United States Patent Application Publication US 2017/0114356 A1 - sequence listing, part 123

SEQ ID NO: 228234 - protein, 1323 aa, Zea Mays
MALFRKFFYRKPPDGLLEITERVYVFDSCFTTDVFDDDKYRDYIGDIVAQLQSHFADASFMVFNFRDGDSQSLLANILSSYDMVVMDYPRQYEGCPLLTIEMIHHYLRSGESWLSLGQQNVLIMHCERGGWAVLAFMLAGLLLYRKQFIGEQRTLEMIYRQAPHELVQLWSPLNPMPSQIRYLHYISRRNVSSEWPPQDRALTLDCVILRNIPGFNEEGGCRPIFRIYGQDPLPATNNTPKVLFATPKRSKYVRLYKKADCELIKIDIHCHIQGDVVLECISIDVDQEREEMMFRVMFNTAFIRSNILMLNRDEIDILWDAKDRFPKEFRAEVLLSEMDTANQLGPMEVAGIGEKGGLPVEAFAKVQEMFSNVDWLDPTGDAAVQLFQRLTSSENIQLRQGFLSPSKKEAESLELGSISPIDKHFDNVQQEPSKVEHPTVYVNKLENVGQERLVLLEQTTNSEVKTGISVVQENPGSLVHKVDSNAKQSISLEKAVPSTMKSIDPVLKDQNAKLDEQHGSGQHSFPTIIMSQRFPISSSCPALSGYSSPRLLSACPRFNSAPSALGITALLEDHAGSAENRCGSTTLTFDTTGTPVVTKGMPLLRPPPSPLDLLVSDSTMMSEAKGSSQPTLNNSGLPSHPERQLTFQSLGTTTPATNHQKSSTTVTIELLPTSAPPPPPLPPPSSVFSSRIYHLPPSPTSFRSPAPAAPQPPPVPPPPPPMPRPFPVRSHAPQPLTPQPPALSSSLILSGTPQSPPSPPPSRCSLSKPPAPPPPPPPPPLLASTSSTIRPAASHLPLFASTSSPVRPAAPPPPPAPTSSPIRASALPPPPPPGTSSSPRPPPPPCYSSKQSSSPMGKSMPSPPVPPPPSHGGRNGASGNIVPPPAPPGSNAKLFGPQGRGPAPPSGPMSKSFQSGQAVLRRSNLKPLHWVKVTRAMHGSLWAESQKPDETLKAPVFDMSELENLFSAALPSSDSRRSDKSGSRASGSKPEKIHLIDLRRANNCGIMLTKVKMPLPDLMSAILALDDTVLDADQVENLIKFTPTKDEIELLKGYKGDKQVLGECEQFFMELMKLPRVESKLRVFSFKIQFRSQVSDLKRNLNIVNSSAEEIRGSVKLKRIMQTILSLGNALNQGTARGSAVGFRLDSLLKLSDTRARNNKMTLMHYLSKTLKDFLIGAEAEVRSLTSLYSNVGRNADALALYFGEDPARCPFEQVVTTLQNFVRLFTRSHEENCKQLDLEKKKALKEAEDNSKQLDLEKKKTQKEAETEKIKKKSDSEKACKKELENDKSSKKDSANEKGKLNNPIKELDISLQSPAQTASAK

SEQ ID NO: 228235 - protein, 287 aa, Zea Mays
MAPRARSALYFFLSVSTRFLHWMSRRRNERVNRCGGGDGGDEAGVVNRRRERGWSARGEERRAVGHDDRDAARGGAVQMHGCCLDPRVGRGRFDRDTKPARDYRISDSLAQARASIVRACTVAVTPSELGAPNCTPNPYPFILTVNRRRHGRHDRAHGGVQILLLLLPWILHEVPMDIVTRLLDVLKVFSALESSHTTMAIMTHHDNKQLANRRMRGPWPPPSGHRLPQRRAWQLVEWVLRRCRSRGNLPYISLPESNFTGIKFSPGQQHYCYDLISLVCNSRNWHR

SEQ ID NO: 228236 - protein, 162 aa, Zea Mays
MCQPLRTVSYSNSWDGTCVAAANENDHTGISGTLDREDDSCSRHSINKEVSLVQGVMKMEQSMVQSIQFVSFYLQNHLRNFMYIYLFRSLLQQQQQQQQQQQQSLLSQARWGRLEMKPRMKTSELNPQRKKGETKAKENRKRRNGGTHKRDKTHKNQQGLNG

SEQ ID NO: 228237 - protein, 305 aa, Zea Mays
MQELGPFRVNSDNKTLSRNKAAWNNVANVIFLESPAGVGFSYSNTSSDYGLSGDRRTAADAYLFLANWLERFPEYKSRPFYISGESYAGHYVPELAATILTQNSYNSRTAINLRGILVGNPLLDSYMNLKGAVAYYWSHGLMSDEVFDNITRHCKYDSSDGVACSGALEAVDPGQIDPYNVYAPICVDAANGAYYPTGYLPGYDPCSDYYTYSYLNDPAVQNAFHARTTSWSACANLNWTDAPISMVPTVAGLIEKKLPVWIFSGDFDSVCPLPATRFSIHDLNLHVTTPWRPWTVNMELGEHDF

SEQ ID NO: 228238 - protein, 199 aa, Zea Mays
MSLCSEEKVFREMEPLLLQILRIGFFEILKLDVPAYAAVDENVRLAKVALRPGAGNMVNAILRKLVLLKETDSLPLPKIEGDDRAQARALSIIYSHPVWMVRRWIRFHGKDEALRLMNWNNSDPHFSLRVNTSKGYTRADLVKRLESLQVHYEESIMDEFVRIREGMQQVLKAGLLKDGICAVQDESAGKTANYRPKWV

SEQ ID NO: 228239 - protein, 393 aa, Zea Mays
MSLCSEEKVFREMEPLLLQILRIGFFEILKLDVPAYAAVDENVRLAKVALRPGAGNMVNAILRKLVLLKETDSLPLPKIEGDDRAQARALSIIYSHPVWMVRRWIRFHGKDEALRLMNWNNSDPHFSLRVNTSKGYTRADLVKRLESLQVHYEESIMDEFVRIREGMQQVLKAGLLKDGICAVQDESAGLVVSVVDPQPGETIVDCCAAPGGKTLFMASRLSGEGKIWALDINKGRLRILMDAAKLHGLDDMITDIHADLRLYAKETTVKYDKVLLDAPCSGLGVLSKRADLRWNRQFENLEELMCLQDELLDSASMLVKPGGILIYSTCSIDPEENEERITAFVQRHPEFALQSVCGYVPREFITDEGFYSSNPTKHSMDGAFAARLVRSTH

SEQ ID NO: 228240 - protein, 789 aa, Zea Mays
MTVWYDLLQWRNEMYNSVIDAFKDFGQTNPQLHHLGYRDKAWNVNKLAHIARKQGLPEVCVTILDKMYGHATMEVQEAFVKICEQAKAYLEMKGELVSGLNLINNTNLEFFPVKNKAEIFRLRGDFLLKMNECETANQSYSNAITLFKHLPKGWISWGNYCDMVFKETKDEVWLEYAVSCFFQGIKYGVSNSRSHLARILYLLSFDGQNEPVGRALDKYLEQLPHWVWLSWIPQLLLSLQRSEAQHCKLVLMKIAQVYPQALYYWLRTYLMERRDVATKTEIGRNMLAQQRMQQAMMANNAANNLPDGSARASNHAGSNMTSDNQSHQASQSVGAAGSHDGGNVQGQDPERSTPEGGTNTSHDQGQQSSTGAEGSQVPLRRNSGHGWVTSAASAFDAAKDIMEALRSKHTNLANELELLLSEIGSRFVTLPEERLLAVVNALLHRCYKYPTATTGEVPQSLKKELSGVCRACFSQDAVNKHVDFVKEYKQDFERDLDPESATTFPATLAELTERLKHWKNILQSNVEDRFPAVLKLEEESKTLRDFHVVDIELPGQYFTDQEIAPDHTVKLDRVGPDIPIVRRHGSSFRRLTLIGSDGSQRHFIVQTSLTPNARSDERMLQLFRVLNKMFDKHKESRRRHLAIHTPIIIPVWSQVRMVEDDLMYSTFLEVYEINCARHNREADSPITIFKEQLNQAVSGQLSPEAIVELRLQAYNEITKNIVNDNIFSQYMHKILPTGNYLWTFKKQFAIQVALSCFMSYMLQIGGRAPNKILFAKNTGKIFQTDFHPG

SEQ ID NO: 228241 - protein, 412 aa, Zea Mays
MAKQTESYELHKLRPQVDDLFKEFDALVDRPLDEREDLAAIFKVLEEIRDKIKIKHGGKKVDDDELLPRSKRGDLANLLPLIRTALELRSKPPPPPVQQDATGGAHDSKPTGCIPCKPRPSQQHKEEKEGSKEVVSLKLLLRLTQNVLEPEQYYEWTTSYVDEERIYGWDKEAGEVIDALVAAADGSGARMFRAAGIAGIHGSGKTALARKVFVHDKAKDNFALRLWVCVGPPDSEDRFNLLYRMLDNLGLDTDKVEEVVDKSSVVRDARGRTEAELRKAAARPAEQKKARAASSSPRPAPVEMPTGRQRTRSCSRRRSAALHPQHGPVQDVVHDRVRRHPGVPPRRRRRTGMLVQQPHAAAAGGGRVGGPPRLRPAQDETQGRRAGDLPQGRRRQDHGAHGPRGPPAQARR

SEQ ID NO: 228242 - protein, 101 aa, Zea Mays
MKWVGCPHDKRRRQQLRKSMKEYCPERLLLISKNCYQQHQSSAQVQMSVVISATSKDLLGFTCIYINPQALLCYSILELNLGANKIGSLHFGKLEYISLSR

SEQ ID NO: 228243 - protein, 97 aa, Zea Mays
MKWVGCPHDKRRRQQLRKSMKEYCPERLLLISKQHQSSAQVQMSVVISATSKDLLGFTCIYINPQALLCYSILELNLGANKIGSLHFGKLEYISLSR

SEQ ID NO: 228244 - protein, 280 aa, Zea Mays
MLWKPATPVYPKLIKEAPDGFTKEEADEMRRKGRDLLPICKLAKNGIYITLVKDVRDAFEGSDLVKIDCEGLNPSDYKKIGAKLRDLVPCVLLSFDDEQILMHRGKEWKSRYSKPLTLIPKVPKNNLAMTSVMNSSDEVSDANTQVAIREVLRPKMFKLWKSAVDSSLALLLDDAEANNLTPDSLLTLVEEFSVTSQAVEHSFPALLVTNGDASTDSLSAEYMNDEPETSVAGNEEGQLEQSPDLRDDEHFDVDMFERLESSVPLGSLPIDSMIERLNSE

SEQ ID NO: 228245 - protein, 413 aa, Zea Mays
MEAPQPWVILRRVLVRKDPEAKQAGHPPAISTALRSPPRVTNLAVAVGPNAHPGRPVRFYEVPYLVATGPSALLYCFYFDVIPLVTDELLLARRFVAPADAKRQPTTGSADRVPRRTGSSSMPVTYNIRNVGLIPGLSGGYVIAELQVTKRSNRAKLFRLMSGDDRRSEAGRLFEGDRQRWYETELHCPLPTMEREWAPQGVVSLANKLWWFDLSWGLLSCDPNDIVHPVLSYHKLPPGCVFLEPMAFIHYIRCICVSENMLRYVEMVRGSFRDGMFVGEQKVVMWTLVPVPSGDGDIEWKWHKSYEMDFKDIWDDAIYKAAGLPALVPQIVLVSPRNHNVVYFFRDNRLFGIDVPSHRLVHVLEDCYKLEAPVHSLSVFPWDLPSWIANGLVEDMTTIPEQGGSASTSQGAT

SEQ ID NO: 228246 - protein, 333 aa, Zea Mays
MDRKDVGILAMDIYFPPSCVQQEALEAHDGASKGKYTIGLGQDCMAFCSEVEDVISMSLTVVNSLLKKYKIDPKLIGRLEVGSETVIDKSKSIKTWLMQIFEESGNSDIEGVDSSNACYGGTAALLNCVNWVESNSWDGRYGLVVCTDSAVYAEGPARPTGGAAAIAMLIGPNAPISFESKYRASHMAHVYDFYKPDLASEYPVVDGKLSQTCYLMALDSCYRQFCNKYEKIAGKQFSICDAEYFVFHSPYNKLVQKSFARLYYNDFLRNCSSVDDDAKEKLQSFSNLTGEESYQSRDLEKASQQVAKHLHDIKVQPSTLLPKQIGNIMGKEL

SEQ ID NO: 228247 - protein, 520 aa, Zea Mays
MGNCCPGSGDAEPAPAASADPSSHLHSGSLSLKAGASAGSAPTPTKPPAPIGPVLGRPMEDVRSIYTVGKELGRGQFGVTSLCTHKATGERFACKTIAKRKLSTKEDVEDVRREVQIMYHLAGQPNIVELKGAYEDKQSVHLVMELCAGGELFDRIIAKGKYTERAAASLLRTIVEIVHTCHSLGVIHRDLKPENFLLLNKDEKAPLKATDFGLSVFFKQGEVFKDIVGSAYYIAPEVLKRNYGPEADIWSIGVIVYILLCGVPPFWAESEHGIFNSILRGQVDFTSDPWPRISPSAKDLVRKMLTSDPKKRISAYDVLNHPWIKEDGEAPDTPLDNAVMNRLKQFTAMNQFKKAALRVIAGCLSEEEIRGLKEMFKGMDSDNSGTITVDELRRGLAKQGTKLSEAEVEQLMAAADADGNGTIDYEEFITATMHMNRMDREEHLYTAFQYFDKDGSGCISKEELEQALKEKGLLDGRDIKDIISEVDADNDGRIDYSEFVAMMRKGTAEPNPKKRRDVVL

SEQ ID NO: 228248 - protein, 204 aa, Zea Mays
MQCCPCPAAGVLFFGSRPPVTAGLIFEDSASAAVARSTHDDSTAPTTIIYAGSVCAYDGAMIEQAEKVLAMVAKEAHAAGILSVQRTEPQLELVAAITGGAAQMTMHRRLAHHVSDSLKRTASLARFLDKRKQRAESAGTMQHHPRREEWRFPAQTTDAPAATVSARTSASLGGMDRRPRASQDHPKRMKASHGDEAVSTELRI

SEQ ID NO: 228249 - protein, 294 aa, Zea Mays
MRTANTKMLPRAAADEETREGEMGPDLLGLGLLPPPMAGGGHGGGSAAQRRPYQKTGFDEPLRFAADAPLPVRPRPRPVDVDDGVVPAAAPPASMPKPPASSTAARRPPVTAGLIFEDSASAAVARSTHDDSTAPTTIIYAGSVCAYDGAMIEQAEKVLAMVAKEAHAAGILSVQRTEPQLELVAAITGGAAQMTMHRRLAHHVSDSLKRTASLARFLDKRKQRAESAGTMQHHPRREEWRFPAQTTDAPAATVSARTSASLGGMDRRPRASQDHPKRMKASHGDEAVSTELRI

SEQ ID NO: 228250 - protein, 453 aa, Zea Mays
MATADQSRIFMKDVKRVIIKVGTAVVTRHDGRVSTGNFGVLCEQVKEINALGYEVIIVSSGAVGVGKQRLNYRKLVNSSFADMQKPQTELDGKACAAVGQSGLMALYDMLFTQLDVSSSQLLVTDSDFENPNFRERLRETVESLLDLKVVPIFNENDAISTRKAPYEDSSGIFWDNDSLAGLLAIELKADLLVLLSDVDGLYSGPPSEPQSKMIHTYIKDKYHNEITFGDKSRVGRGGMTAKVKAALVASNSGTPVVITSGSASGSIIRVLQGEKIGTLFHKDASLWEPSSDVSACEMAVTARECSRRLQNLSSDERNKILLDVADALEKNENLIRTENEADVAAAQDAGYEKFLVDRLTLKPGKISALAKSIRTLARMEDPINQILKRTEIAENLILEKTSCPLGVLLVIFESRPDALVQIASLAIRSGNGLLLKGGKEAMRSNKVLHKRQQ

SEQ ID NO: 228251 - protein, 313 aa, Zea Mays
MIHTYIKDKYHNEITFGDKSRVGRGGMTAKVKAALVASNSGTPVVITSGSASGSIIRVLQGEKIGTLFHKDASLWEPSSDVSACEMAVTARECSRRLQNLSSDERNKILLDVADALEKNENLIRTENEADVAAAQDAGYEKFLVDRLTLKPGKISALAKSIRTLARMEDPINQILKRTEIAENLILEKTSCPLGVLLVIFESRPDALVQIASLAIRSGNGLLLKGGKEAMRSNKVLHKLHDVIDLVIPRGSNKLVSQIKTSTKIPVLGHADGICHVYIDKSANMNMAKQIVMDAKIDYPAACNAMVCLICYNL

SEQ ID NO: 228252 - protein, 478 aa, Zea Mays
MATADQSRIFMKDVKRVIIKLGNPIPIYGIERVREKEGIERAERAREKVGTAVVTRHDGRVSTGNFGVLCEQVKEINALGYEVIIVSSGAVGVGKQRLNYRKLVNSSFADMQKPQTELDGKACAAVGQSGLMALYDMLFTQLDVSSSQLLVTDSDFENPNFRERLRETVESLLDLKVVPIFNENDAISTRKAPYEDSSGIFWDNDSLAGLLAIELKADLLVLLSDVDGLYSGPPSEPQSKMIHTYIKDKYHNEITFGDKSRVGRGGMTAKVKAALVASNSGTPVVITSGSASGSIIRVLQGEKIGTLFHKDASLWEPSSDVSACEMAVTARECSRRLQNLSSDERNKILLDVADALEKNENLIRTENEADVAAAQDAGYEKFLVDRLTLKPGKISALAKSIRTLARMEDPINQILKRTEIAENLILEKTSCPLGVLLVIFESRPDALVQIASLAIRSGNGLLLKGGKEAMRSNKVITG

SEQ ID NO: 228253 - protein, 705 aa, Zea Mays
MLEQQGALGCDVTVARVVFHEITENAIKKALMSPRYIDMDLVNAYLARRSLDYVIGFGISPLLWRKLPGCQSAGRVQSAALALVCDRESEIEQFKPQEYWTVRADFKMQFADLSNGTCIPFHIKHLNSKKLGQLSIPSQEEAQAIEKRIHSSKFEVLGVKRSKIHKNPPMPYITSSLQQDAANKLHFTAGYTMKIAQKLYEGINLSSEETTGLITYIRTDGFHISDGAAEDIRSLVKERYGQKYVLEDTRKYLKKVKNAQEAHEAIRPTSIRRLPSSLVGILDDDSLKLYTLIWKRTMACQMEASRTQMIQVDVGTPEGEMIFHSAASKLDFKGYQSVYEDTEGDSVHEDNFEALSKLMVKDLVSPVNVHLGQHFTKPPSRYSEGALIKKLEELGIGRPSTYASIMKVLQDRKYVTAKSRVLHPEFRGRMVSAFLLHHFSEVADYSFTANMETELDNVSAGLTEWKGLLKGYWERFSKYCADASNLDGRKVERMLEEKFGPILFPNVDTDNRICPSCSEGTLRFKVSRYGEGYFIGCDRHPKCKYIARSLSQQEDETEPTEECQKTFTPRLLGVMPDSDEKVFLKQGPYGHYVQIGEDKKGLFPKRASLSKVKDIDSVTLEDAIELLQYPKILGKHPEDDYPVLITHSKVGYNIKHRRSLALVPKSVDPKKMTLERALKLLSGKSVRRIGRPKGKVENKEPMEWH

SEQ ID NO: 228254 - protein, 160 aa, Zea Mays
MEQEFLQALQAFYYDQKAIMSNEEFDNLKEELMWEGSSVVIAKQTNSVIVKEGPRCSLRSHKVYSDLNVDYIKMFLLNVPATTVALGLFFFIDELTGFEINVFQVSVHLIQLPEPFGFIFTWFAALPLILFLAQSLTKAIVQDFLILKGPCPNCGTENLS

SEQ ID NO: 228255 - protein, 100 aa, Zea Mays
MTRWWTGTSSPTAASTGSRRRRWERWSRSSCKPSRPSTMTRRPSCPTRSLTTSRRSSCGRGAASSLLNEDEQKLLEASMAYASGNPIMSDAEFDELKLKL

SEQ ID NO: 228256 - protein, 208 aa, Zea Mays
MSAKQLCDALAAVGFDAGDDPLDADSLEWAFLQGEDSRRMLAWVCARLRPGNVLSATDLELYEQLEMEGKLLKGEDLDFAFDRISAFSDNMENQEYIFLTEESLEDICESKLALRAEVSDLERQLASLEWRLDILTAQATTINQGKKSRSSANTRANGQLTGLDKMFAKRSLEDQDPDTWTQSGCWAEKVRYSSRDKHLNSTRDEQYW

SEQ ID NO: 228257 - protein, 57 aa, Zea Mays
MAAAAGGVRRALAALRSGSPSTISATLSRQAAARSLELAAASLPRASRRRLAISRLR

SEQ ID NO: 228258 - protein, 881 aa, Zea Mays
MPGPAVEAAARSGGDHHGGCCGKAAGKWEKTYLDVLGICCTAEVALVERLLTPIQGVRAVTVVVPSRTVIVDHDTAAVSQFHIGSEQGGPRGLRPSLWQQRRRRRAVAQPVHRRLRRPARPVPARAAAPPAAVAGGGGGLRGLPAHAAPGVRRGGQADAGHQHPDAHRGRRLRGARELHGGRRHRVPLHRRRVAGDAGVQQGQRRDAVPHVHGAQDRRAGRDGAGRRHGRRRGRHRRRGQGRRRGPRGRRGRRRAQRGRREQPHRRVLPRAEAAAVGGLGRHHQLRRLHLREDDGPRRELDGGEDGEAGGGGPEQPVSDAAAHRLVRQALHPCVVVLAAGVVLVPALLGARDLELEHWFRLSLVLLVSACPCALVLSTPVATFCALLRAARMGLLVKGGNVLESLGEVRVAAFDKTGTITRGEFSIKDFHVVGDKVEMNQLLYWVSSIESKSSHPMAAALVEYAQSKSVQPKPENVTETCIYHGEGIYGVMDGKQIYIGNERIIARSSCRHHQHAGHQETDGLKGVSIGHVICDGDLVGKFSLSDTCRTGAAEAILQLRSMGIKSVMLTGDSAAAAKHAQEQLGGVLEELHAGLLPEDKVRLVRGLQARHGATLMVGDGMNDAPALAAADVGVSMGLSGSAAAIETSHAALMSGDILRVPKAVRLGRRARRTIAVNVASSVGAKAAVLALAVAWRPVLWVAVLADVGTCLLVVLHSMLLLRDGAARRPRCCASATACKSKQASKPCCATVKPVATTRHRHGHGHGHGHAGAGKPGTLGGDKQGKDCHGCCQKESKPPEDAVVIAIPGRAVEHRKEAFPHENAGAGGCCAAAHGAEDEVCIVISARSPCCSTARSRSGSPKDALCCHGSGGKDGGAISALVC

SEQ ID NO: 228259 - protein, 503 aa, Zea Mays
MSAAGATAVCTRDGGLLPLRPHCARSSSSFAAAAAAIVIYLTAPGLAVLPMRVMASDSIASVKLRVQTSRGVRARKQKLVFGGRELARDDGRILDYGVADGNVVHLVIRVPDVRLITVETVQGGKFRFRVEPGRTVGYVKQQIAKDHPAAARPGEQRLVLEGEDLDDRHLIHDVCRADGAVIHLLVRRSVVARDAGSGRPSPPPRRDDVRIEPVGGDHKAAVRGMVDAALAGMESGNAPIMSSEGTGGAYFMRDATGQRHVAVFKPADEEPMAANNPRGLPVSSTGEGLKKGTRVGEGALREVAAYILDHPPRSGTADDGFAGVPPTALVRCTHGAFRQGGAGAGARAPVPKLGSMQAFVSNCGSCEDMGPSAFPVQEVHKICVLDIRLANADRHAGNILVRKHDGGGGGVRGLHFRVALLASVPGALQRRDGGVRAVPGRGGGRDYAEAPRVGGVARVRAHAARRHHAAEEGCGEGPHRLPHREHHVQRDPDQGVRHRRDRP

SEQ ID NO: 228260 - protein, 165 aa, Zea Mays
MSSLPGGFLCVRVLRGIDLVSCDAKGSDPYVVLSLDGQKLKTSVMKKTVNPLWNEDLTLAVMDASAPIKLEVFDKDTFSKDDMMGDAEFDVEALAQIVQMDLEDIRSGTVVRTVRPGGTGSCLADESHIIWDKGHVVQDLLLRLRNVDSGVIHLQLRWVATPPED

SEQ ID NO: 228261 - protein, 271 aa, Zea Mays
MSSLPGGFLCVRVLRGIDLVSCDAKGSDPYVVLSLDGQKLKTSVMKKTVNPLWNEDLTLAVMDASAPIKLEVFDKDTFSKDDMMGDAEFDVEALAQIVQMDLEDIRSGTVVRTVRPGGTGSCLADESHIIWDKGHVVQDLLLRLRNVDSGVIHLQLRWVATPPEGFSGHGRRQRPEVQDGAREERREEQGRQRQPAGGQQEGHEHPVQDLHADLHLHHLRGQVQRTCGGEASQERPLPVLPPPQELVSSRSICSAQLKDKYYIYIYTLCVN

SEQ ID NO: 228262 - protein, 63 aa, Zea Mays
MRRRGIPRTTSTSASPTSRTSKQQKHMLCSAKRQVLHIYIYAVCQLMGSRLLLMRLLRSCCPV

SEQ ID NO: 228263 - protein, 61 aa, Zea Mays
MCGFVSWKQTALRILEVRSAYVKNEFEWDNLKELSFKMVDEANTKLMRDYVVEVSHIEDEN

SEQ ID NO: 228264 - protein, 891 aa, Zea Mays
MDRRSWPWKKKSSDKSSNADVLQNFNHAEQEDKAPKFVQISPETYAHLTESEEKVKKLEENVKVLNEKLSAAQSEITTKDALVKQHAKVAEEAVSGWEKAEAEASALKLQLETVTLSKLAAEERAAHLDGALKECMKQVRAVKEEGEQKLHDVVFAKTKQWEKIKAELEAKLLEFEQELIRAGAENDALTRALQERAELLMKIDEEKAQAEAEIEILKSTIQSGEREINSLKYELHVVSKELEIRNEEKNMSVRSADVATKQHQEDVKKISKLEAECQRLRGLVRKKLPGPAALAQMKMEVESLGREYGDHRVRRSPAKNSSFHRPMSPMSPVPDYAIENIQYMQRENEFLTARLLTMEEETKMLKEALTKRNSELQSSRSMYAKTAGKLRSFEVHMLTGNQHKSPTMNMDIHFDGALSQNGSNPPSMTSMSEDGVDDEGSCTESWANTLVSELSQFKKEKAAKSSATESSNRLELMDDFLEMERLACLSSDVNGNGSTIDKMKIDEVGATLSDFTERDGVKDLQSASPMTESPSNKQRLSEKSSLSKFQSRISLLLDSESAENNAEVLDSIRNILKDIEDEADSVNTNGTHHSGRTLSLDSKCAIDQELKNAILKIQDFVKLLDQEVSKFQGQSSDYNGLSEKTQQFSALVDKVLSNDDVLNDIVMALSVILSETSQIKLTLLRDNNNEAESNNLDCVDKVTLLENKVQPEPVKDNGSGLCPLLPHSSSDPEFEGPTDAGFDVKAAVKVCSPEEYEQLKSERTNLEGELAKCNKIIEETKVRLSDMEKNLENLTSKLADSEKSNSLSETQLKCMAESYKSLESRKLELENEIEVLRSKIDALTAELSDERQSHQDDLVKYRDLEEKMERYEMERSSMLVDGDPDTKSKQR

SEQ ID NO: 228265 - protein, 1054 aa, Zea Mays
MFGLQASGAAASWVVGRMGTDAHLYDDPDDASIPELLDSRFDADKVDALKRLLALIAQGVDVAHLFPQVVKNVASQSLEVKKLVYLYLLHYADKRQNEALLSINIFQKDLSDINPLVRAWALRTMAGIRLHVVAPLVLVAIKKCARDPSAYVRKCAAYALCKLCDLIPDENAALEEIVDTLFSDNSPGVVGAAAVAFKSVCPSCLPLVSKHFRRLCETLPDIEEWTQIVLIEILLRYVIARHGLVKDSLLFASDLPTEIHGVTDSDAVASVPTQSDSIVNGVSDTISSIMLFRHYIEQCSGSSDREGNNLELSSVTANNNDDVTILLKCTSPLLWSRNSGVVLAAASVHWIMAPIGDMKKIVGPILFTLRSSPDAAYVMLGNIVVFVKTMPSLFAPFYEDFFVNTSDPYQTRALKLEILTTIATESSIPAIFEEFQDYIKDPDRKFVADTVAAIALCAQKLPSIATSCLEGLLALVFYESFISNSVHLDGEDAVLVQAILSIKAIVKMDPVSHEKVIVRLVRGLDKLKEPAARSLIIWMFGEYSFMGDLTTKIVPPVLKYLAWSFVAEVVETKLQILNSSAKVIMRCTEEDMEEFKSIVAYVIELATCDLNYDVRDRARLLSRLLPCYMTHQGSSHQPQNGDIYKELANHIFNGKLQPTSHPASNYRIYLPGSLSQVVLHAAPGYAPLPKPQSMELNHNVTAAIRGKAKLSGSDSDAESGSSTYESSSVYDSESEGAGLSDRDTVESHQAQEDNQDAPLVQIYDASIQQGQAGQNTEENLADLISTDLTELMSKSALESWLDEAPAEPVVQNLTQTSSARVSFTNRNFERKPKLHTLLDPSGSNGLSVLYAFSPEVSPRSRLLVCVDLYFENVTTQQLTDITIESEEASSSVDFIDQTSEGYSGVPTIVPVEGIHSLAPQQMAKLVLQENQLRGMFEYARRCAFKDHLQKLGHEDSAEHIDKNLQVAQSVASKILSNANIHLVSMDMPVTFSVDDASGLCWRFSGEILSTSKPCLITILAEGRASGPLDLAVKVNSEDTVFALNLLNRVVAIID

SEQ ID NO: 228266 - protein, 1111 aa, Zea Mays
MFGLQASGAAASWVVGRMGTDAHLYDDPDDASIPELLDSRFDADKVDALKRLLALIAQGVDVAHLFPQVVKNVASQSLEVKKLVYLYLLHYADKRQNEALLSINIFQKDLSDINPLVRAWALRTMAGIRLHVVAPLVLVAIKKCARDPSAYVRKCAAYALCKLCDLIPDENAALEEIVDTLFSDNSPGVVGAAAVAFKSVCPSCLPLVSKHFRRLCETLPDIEEWTQIVLIEILLRYVIARHGLVKDSLLFASDLPTEIHGVTDSDAVASVPTQSDSIVNGVSDTISSIMLFRHYIEQCSGSSDREGNNLELSSVTANNNDDVTILLKCTSPLLWSRNSGVVLAAASVHWIMAPIGDMKKIVGPILFTLRSSPDAAYVMLGNIVVFVKTMPSLFAPFYEDFFVNTSDPYQTRALKLEILTTIATESSIPAIFEEFQDYIKDPDRKFVADTVAAIALCAQKLPSIATSCLEGLLALVFYESFISNSVHLDGEDAVLVQAILSIKAIVKMDPVSHEKVCCNVQSCIRAVIVRLVRGLDKLKEPAARSLIIWMFGEYSFMGDLTTKIVPPVLKYLAWSFVAEVVETKLQILNSSAKVIMRCTEEDMEEFKSIVAYVIELATCDLNYDVRDRARLLSRLLPCYMTHQGSSHQPQNGDIYKELANHIFNGKLQPTSHPASNYRIYLPGSLSQVVLHAAPGYAPLPKPQSMELNHNVTAAIRGKAKLSGSDSDAESGSSTYESSSVYDSESEGAGLSDRDTVESHQAQEDNQDAPLVQIYDASIQQGQAGQNTEENLADLISTDLTELMSKSALESWLDEAPAEPVVQNLTQTSSARVSFTNRNFERKPKLHTLLDPSGSNGLSVLYAFSPEVSPRSRLLVCVDLYFENVTTQQLTDITIESEEASSSVDFIDQTSEGYSGVPTIVPVEGIHSLAPQQMAKLVLQVHFHHHILPLKLSVFCNGKRHPAKLHPDIAYFVRPLPMDLNTFLCKENQLRGMFEYARRCAFKDHLQKLGHEDSAEHIDKNLQVAQSVASKILSNANIHLVSMDMPVTFSVDDASGLCWRFSGEILSTSKPCLITILAEGRASGPLDLAVKVNSEDTVFALNLLNRVVAIID

SEQ ID NO: 228267 - protein, 224 aa, Zea Mays
MDALSRPAVVIDNGTGYTKMGFAGNVEPCFITPTVVAVNDSFSGSAQPAVRGTPARGNWLAQHSAGVMADLDFYIGDEALARSRASSSHSLSYPIRNGQVENWDTMERFWQQCIFNYLRCDPEDHYFLLTESPLTAPETREYTGEIMFETFNVPGLYIAVQPVLALAAGYTTTKCEMTGVVVDVGDGATHIVPVADGYVIGSSIRSIPITGKDVTQFIHQLLKR

SEQ ID NO: 228268 - protein, 451 aa, Zea Mays
MWCIWMCLSPFYESRTKMVGPVVKLLLLIVATAVLVIWLIIGVVGSILAGLAYGFLAPVMATFDAIGEGKENPLVHCFLDGTWSTITGSCTVVRDMKDMLVHSYFSIMDEVRLHAPPDGKPYEISVPFGVYAAVVVYQESSLFLGLSYAISSVSIFDEYTNDVLDMAPGSCFPRFKYRTNEASSHGGSLSRPASFKDKHDGKKAPQRVTSFKSSFDEFNPFKLLDHLFIECKHHGKDLVAEGVITPKDIEGTKAGKASTGVLNVGLPAYVILKALLRSAKANSDGLVLSNGSEITSDNRPTSKIFEWFFDPLMVIKDQIKAENFTEEEEAYLEKQVLLISDPKRIKENLIRLPPLSERKQAEIEAFARRLQGITKSISRYPTSKRRFDALVKALSEELARTMGGNQSANGSQVRKIRSGIVRMLSQRSLGKTTGIPGDDHEAQLTSDGFTS

SEQ ID NO: 228269 - protein, 141 aa, Zea Mays
MKWDNYTYLDVDDDVPFSVRDRLASGASSQHVIINVDKIVFTITHEVSDTDIFFPLVQTCISDIRVVTQIFPSKIRILSSFKVSAQYFIARRNLWEELISPITSYTFFRFKFFTPDPVTKYGKTAMRFFFQLKQKVHLRSC

SEQ ID NO: 228270 - protein, 87 aa, Zea Mays
MACRFSILLAIATLAMMFAVDQEHSGDDFSFTLKEGPTVTWTLDTKTPLKYPLCIRFAVKSGGYRIADDVIPANFKAGTTYKTTLSI

SEQ ID NO: 228271 - protein, 142 aa, Zea Mays
MTRHLWKNFEERNDDIGLDEWRARRSRVRSGGEEVWSVITDGNAGCRFDRATSIRDQGVFYHRRGGQYKRFASNVLLFQHLDSTSVLKMSISLGLRCDDSSLDYWAHLAQEITLDHVKAVGFLGDGFWRHTRDEQMKLDIGC

SEQ ID NO: 228272 - protein, 176 aa, Zea Mays
MLFDPDVVLSVVFGKNGGLEQISIRKGYVDMCTVDATTLTKISDERNDDIGLDEWRARRSRVRSGGEEVWSVITDGNAGCRFDRATSIRDQGVFYHRRGGQYKRFASNVLLFQHLDSTSVLKMSISLGLRCDDSSLDYWAHLAQEITLDHVKAVGFLGDGFWRHTRDEQMKLDIGC

SEQ ID NO: 228273 - protein, 592 aa, Zea Mays
MAVGGTQPVLRKYLGALKDTTTVSLAKVNSDYKELDIAIVKATNHVERPSKEKYIREIFHSISAARPRADVAYCIHALARRLSKTRNWAVALKTLIVIHRALREVDPTFREELLNYGRSRSHMLNMAYFKDDSSAEAWDYSAWVRIYALYLEERLECFRVLKYDVETDPPRTKDLDTVDLLDHLPQLQQLLFRLLACQPQGASSYNVIIQHALSMVALESVKIYTAISDGTINLVDKFFEMQRNDAVRALDVYKRATNQAERLSEFHEVCKTIHIGRGEKFLKIEQPPASFLQTMEDYVRDAPTGQKQKLFRLKLSGGPSTILFISLYSSHPVFLPLSVLHLLQTILAIEYKKEPEEEEKPASPPPAPEQEPEQEPEPEPEPVKEEAPEAEPDLLGLNEPSPAATAIEEQNALALAIVPIDDVPGAAPTFENGVTGWELALVTAPSSTETAVAPSKKLAGGLDLLTLDSLYDEANRRASQPASYNPWDATASAPMMTTMAPAMHDPFYASNGYAAPHGVQMAAMAHHQQQQQVFMLQQQMMAPAPAVHHPMQMQQNPANPFGNPFAAAGAHPYGAAGMPLHAGPGNVYTGLI

SEQ ID NO: 228274 - protein, 435 aa, Zea Mays
MLNMAYFKDDSSAEAWDYSAWVRIYALYLEERLECFRVLKYDVETDPPRTKDLDTVDLLDHLPQLQQLLFRLLACQPQGASSYNVIIQHALSMVALESVKIYTAISDGTINLVDKFFEMQRNDAVRALDVYKRATNQAERLSEFHEVCKTIHIGRGEKFLKIEQPPASFLQTMEDYVRDAPTGQKQKTILAIEYKKEPEEEEKPASPPPAPEQEPEQEPEPEPEPVKEEAPEAEPDLLGLNEPSPAATAIEEQNALALAIVPIDDVPGAAPTFENGVTGWELALVTAPSSTETAVAPSKKLAGGLDLLTLDSLYDEANRRASQPASYNPWDATASAPMMTTMAPAMHDPFYASNGYAAPHGVQMAAMAHHQQQQQVFMLQQQMMAPAPAVHHPMQMQQNPANPFGNPFAAAGAHPYGAAGMPLHAGPGNVYTGLI

SEQ ID NO: 228275 - protein, 370 aa, Zea Mays
MEGYDREFWQFSDQLRLQTTAFSGLSLGDSIWSPATGAGGRRNNNTDLLAASASAADAGKHNGVGLSLNDGGPGLIGSGKLAFGGSKAGRYNNLPSEKAAPVYNHSGATINGGYARSDNAGLAAFNKMGSYFHNSNGNGGGGGEVKSYFNKSAGRAASNNSHGHAGGGKKGGGGKHGKNEGNGGAVAATDKRFKTLPASEALPRGEAIGGYIFVCNNDTMDENLRRELFGTGTRCGPSARGCPSSSTTTPPTSCTASSRYGTVHYSSQPIPDLPFHLHLHLCSHGSGSDHQAASFGGTNIDPTAWEDKKCPGESRFPAQVRVATRKIYDPLEEDAFRPILHHYDGPKFRLELSVAETLALLDIFADKDDA

SEQ ID NO: 228276 - protein, 77 aa, Zea Mays
MGPGLYSDIGRKARDLLTGGFNTGQQLVLITHCSNGTRIAASSTKSNEFIISEIQAQLKNKNVTVDVKANSEANFCS

SEQ ID NO: 228277 - protein, 156 aa, Zea Mays
MNRKPLVNLSAVFGNKAIAAGADVVYDGATGDFTKYNAGLSFTNADLNAAVTLNNKGDSLTASYYHLVDTEKNTAVGVEVARNFSTKANRVTFGMRHALDPTTTVKARYSSNGMASALIQHEWRPKSFCTLSTEVDVNRFDFLQTPKFGLSLVLKP

SEQ ID NO: 228278 - protein, 597 aa, Zea Mays
MCAWERKLHDEERSVRGFGAEAIGNQLGVVPCGLRRRRKSETLRAQYIDVRELRICAGTWNVAGRLPPNDLDIQEWLDMEEPADIYVLGFQEIVPLNAGNIFGAEDNRPVAMFKPSDDAFVMEDELISESDSEGDGEVHPLNEQDLVDSVDGIHGNKCEPQTILQDEEFSRLPSVKTFDRSNNLSFKESNLEEKICQKILTKTFSHSERLGMIWPEPPLDMFAQCLPDSTKPFASGKVLRSYLSFKSVNGDSGPFAEDNSVPDFYMSCAAVKRKRPYFVRIISKQMVGVYLSIWVRRSLRKHIQSLKVSTVGVGAMGYIGNKGSISVSMSIYQTHFCFICCHLTSGEKEGDELKRNADVQEIHRRTIFNLVSRVNMPKTIYDHERIVWLGDLNYRINLPYEKTHELISKQDWNKLFGKDQLKVELKKGHLFEGWTEGVINFPPTYKYKVNSEKYISDDNKSGRRTPAWCDRILSHGKGMRLLSYKTVDLRLSDHRPVTAVYMADVEVFSSKKLQRALTFTDAEAEEQLSFEEDNASGIYNLGLYESSSEVYTPLVRAKVFSKVTWLKPQPLMRALSRPRRNGLPAVSRSFPTLRLRR

SEQ ID NO: 228279 - protein, 405 aa, Zea Mays
MQLNVKFGQSNFGGVRSSDAWKEKLSSNAYVRKTWEPKGKGFGGFSTRLLSSPIVLEPLHFQYDKRDPNSTYNWFERWTIGCIWKPAFQPKRVADGKPLVKKASYAMETQSAKLKRNIRKGSAAIAGSFHTSGESDKVKRNPKNFSSFPADSVPDSQLSELEKVKRNLRKVTDSMAEASKISSSRVDSSKVCNSTAEVPKESNPVAEISKIRSLLNGISDHQDIQCENTRESSFPLGTQEDSDNDHLLRYSNMDSLDLVPGLKSDQEIQLDSVSIGENVDDPTVVAPAVEEMSPQNIDTEDNVLCKKEEARSKEEHLSNGSLRTSKRKSSFPNKSEYVENGTHATPVQPRQPSYMAATESAKAKLRAQNSPSLDSDSAAEKNGFTRRHSLPSSTKSRALKAEWKR

SEQ ID NO: 228280 - protein, 986 aa, Zea Mays
MDPAPDQLSISASAPFPTIPAASSPRPRAARTRRHAAPFRSDHPTAGSWRSGIDLPRRPSASAFSQQERYPSVASWSASRDANFVFGSGVAGAPEMRRSFSSGSGEASLAELSYAVHRFALDGSGRPSDIDAPGGEGTLPVTDSGGRFGARGCSSTLYEGFSLDSIHHQTEHLDEERGVPSQTIQCESVGMRSLASPTRTDENAPIEFAKRGDSLPIQDSVDQSRNSGHDANAHHDFFVFGGHAGSNSFATNATQTNTSKLNTSVSKDGNCIKFILQDAKHVFGSSDNDLPGSEPCEISTTVETPDTITSSFGSEDGIVTVSSIKVPCNIEVVPASELVECQPFDEKSFTFDDQNVPYRNKGGVKGMGMNRGAFMPNKSSANQASFESVSRSGHCSKKVSPEEKLNLKEASSSLQTTESGHAEAEFTSAANTEHSGQSDFIFSASTFHQSMLHPQRRHNKKKSGGMGNHASSIQSLPSSAIGLACSEVSGSQQCVDLAAKWTEYNKIEPNRVAISRGARCSTSENFGDHDNCETWRLRGNQAYAEGLLTKAEECYTHGIDSFSPNEVSRKALMLCYSNRAATRMSLGKMRDALSDCQEAIDIDSSFLKAHARAANCLLALGDVEEAQKAFEMCLKSNHLSSLDHKIVEEASDGLQKAKKISGLISHSEEYLIKKAFDKIPSALQMISDALSISIYSDKLMEMKAEALLLLQRYEEVIRFCEETLYVAERNSVCLCLDKQSESNNMVNNTCFVKLWRYHLIAKSYFFLGKLEEANQFLKKNDQIKVMGCRCGNQSQDSILSFSMAISELLRLKAAGNEAFQSGKYLEAVEHYTAALMSNSESLRFLAVCFCNRAAAYQAMGQILDAIADCSLAIALDADYAKAISRRSSLYELIRDYGQAANDLRRLIALLEKQLQEDMTMPVERSESIRNNLNRANLRFSSLERDARKGASLNMYLILGIESSSSAVDIKKAYRKAALRHHPDKGC

SEQ ID NO: 228281 - protein, 730 aa, Zea Mays
MDPAPDQLSISASAPFPTIPAASSPRPRAARTRRHAAPFRSDHPTAGSWRSGIDLPRRPSASAFSQQERYPSVASWSASRDANFVFGSGVAGAPEMRRSFSSGSGEASLAELSYAVHRFALDGSGRPSDIDAPGGEGTLPVTDSGGRFGARGCSSTLYEGFSLDSIHHQTEHLDEERGVPSQTIQCESVGMRSLASPTRTDENAPIEFAKRGDSLPIQDSVDQSRNSGHDANAHHDFFVFGGHAGSNSFATNATQTNTSKVHSADKETVTCNSEQLNTSVSKDGNCIKFILQDAKHVFGSSDNDLPGSEPCEISTTVETPDTITSSFGSEDGIVTVSSIKVPCNIEVVPASELVECQPFDEKSFTFDDQNVPYRNKGGVKGMGMNRGAFMPNKSSANQASFESVSRSGHCSKKVSPEEKLNLKEASSSLQTTESGHAEAEFTSAANTEHSGQSDFIFSASTFHQSMLHPQRRHNKKKSGGMGNHASSIQSLPSSAIGLACSEVSGSQQCVDLAAKWTEYNKIEPNRVAISRGARCSTSENFGDHDNCETWRLRGNQAYAEGLLTKAEECYTHGIDSFSPNEVSRKALMLCYSNRAATRMSLGKMRDALSDCQEAIDIDSSFLKAHARAANCLLALGDVEEAQKAFEMCLKSNHLSSLDHKIVEEASDGLQKAKKISGLISHSEEYLIKKAFDKIPSALQMISDALSISIYSDKLMEMKAEALLLCSDMKK

SEQ ID NO: 228282 - protein, 701 aa, Zea Mays
MITFVDSAAMERERESDRCLDPQLWHACAGGMVQMPAVHSKVYYFPQGHAEHAQGPVDLPAGRVPALVLCRVAAVRFMADPDTDEVFAKIRLAPVRPNEPGYADDAIGAAAASGAQEDKPASFAKTLTQSDANNGGGFSVPRYCAETIFPRLDYSADPPVQTVLAKDVHGVVWKFRHIYRGTPRRHLLTTGWSTFVNQKKLVAGDSIVFMRTENGDLCVGIRRAKKGGIGGPEFMHHHHQQPPPPQGGGYAGFSMFLRGEEDGGKMMAAAATRGKAARVRVRPEEVVEAANLAVSGQPFEVVYYPRASTPEFCVKAGAVRAAMRTQWCPGMRFKMAFETEDSSRISWFMGTVSAVHVADPIRWPNSPWRLLQVAWDEPDLTATPFSPPRKKLCVPLYPELPLEGQFPAPMFHGSPLLGRGGAGGPMCYFPDGTPAGIQGARHAQFGISLSDLHLNKLQPGLSPHGLHRQLDHGVQVQVQQPRIAAGLIVGGHPAARDDVSCLLTIGTPKSKKPPSDVKKASTAAAPQLMLFGKAILTEQQISLGGGNVVPALAKKSPSDDDDDVAERTVSNSDVSSPGRSNQDGTSSGGGPAARACWQEEECNNRAAGSEDDLLGHCKVFMQSEDVGRTLDLSAVASYEELYQRLADMFGVDKAELTSHVFYRDDASGALKHPGDEPFSEFTKTARRLTILTDESSDSLAR

SEQ ID NO: 228283 - protein, 360 aa, Zea Mays
MSRYLIDVGALNIISDVLQSQDKELFSAGANILGYFVDLHPDLVRTFIANHEENLEGSSLLEFLVQGMVVDSANEMLYQSCLKELLGSSDTTVNHHDVVLRLFFDKHLQKLIDAIASSCAPKGIARSTSGLAGVRTTVEQHSAKPETLLKICELLSFCALHHTNRMKIFFSTNAMEKILTLTHRREKVLVLAGVQFVRIIIGRKDDFLVDRVIKFNLLKPVIKAFDENEGRDNMLQSVVLELLEYIRKENIKPLIEYVAESCWGQLIEESAETKQSTSVVDMRMKKADERGADKRQEGYFEDSDRVDSSTPTMHSQEQSIPARKPENADGCSKDKEGPPSPSRSTKNSDGSGEGDGSRGS

SEQ ID NO: 228284 - protein, 266 aa, Zea Mays
MEYVFSNAAVARSFTAYLGTAVGVDAPREWRIAVRGLPEGFNQVDLVAVAVILLVSVCICYSTKESSAVNLALTAVHVAFILFVIGMGFRHGDARNLTRPADPARSPGGFFPHGAAGVFNGAAMVYLSYIGYDAVSTMAEEVQRPARDIPAGVSGSVVVVTVLYCLMAASMSMLLPYDAIDPEAPFSGAFKGRERCAWVSNVVGAGASLGILTSLMVAMLGQARYLCVIGRSGVMPAWLARVNPRTATPVNASAFLGLFTAALAHV

SEQ ID NO: 228285 - protein, 133 aa, Zea Mays
MATFTKLEDSPMFRKQVNSLEHLTDELKERCSNLHKGCKRFMGSLDEAYAGDLSFADSLQAFGAGLDDPISVAIGGPVMSKFTTAFRELGTYKELLRSQLEHMLSDRLSQFINVDLNGVKVGLLRAGTSHRGR

SEQ ID NO: 228286 - protein, 104 aa, Zea Mays
MATFTKLEDSPMFRKQVNSLEHLTDELKERCSNLHKGCKRFMGSLDEAYAGDLSFADSLQAFGAGLDDPISVAIGGSLGHTRNSFVLSLSTCLVIACHSSLTWI

SEQ ID NO: 228287 - protein, 164 aa, Zea Mays
MATFTKLEDSPMFRKQVASLALRSSAHEASLIRPRRGNVSCFLGSRSVLRRQLDLGVSNGRIRGSLDEAYAGDLSFADSLQAFGAGLDDPISVAIGGPVMSKFTTAFRELGTYKELLRSQLEHMLSDRLSQFINVDLNGVKVNSPLFSPLETAQHSILVTIGCN

SEQ ID NO: 228288 - protein, 540 aa, Zea Mays
MGRRPSVPTVIAETDDNANIANAEDPEGTPAQLTTAQRLVASAASAEIPPDRYGREAKHFTETRVLNRDVRIVVEGTDSFSNIIGSVYYPDGETAKDLALELVENGLAKYVEWSANMLDVEVKIKLKNAELQAKKDQLRIWTGFKPPATNSKPIHDQKFNGKVVEVVSGDCIIVADDSAPYGSPSAERRVNLSSIRAPKLGNARTDVKPDHFAREAKEFLRTRLIGKQVAVEMEYSRRISTVDGQSAAPTANMADTRVLDYGSVFLGSPSQTDGDDTSSAPSSASQPGVNVAELLLSRGFAKTSKHRDYEERSHYYDALLAAESRAEKAKKGVHSQKESPVMHITDLTTVSAKKAKDFLPFLQRNRRHSAIVEYVFSGHRFKLTIPKETCSIAFSLSGVRCPGKGEPYSDEAIALMRRRILQRDVEIEVEAVDRTGTFIGSLWESKTNMGSVLLEAGLAKLSSFGLDRTSDAYILTRAEQSAKQQKIKIWENYVEGENASNGSTPESKQKQILKFLVVGSFMFRQWVTRGWLQFNSSLHL

SEQ ID NO: 228289 - protein, 132 aa, Zea Mays
MVPRSLDCHQFRRWTVEAWAIARRTWELSLCRAASGTELISIKSPVSGQAATVSVMTDWCAFYGCRFLDWQFALIFGPTVILPPKESTYIFYSLSQEQVPQDEAHGGCYDEFVRGLDHRLPVNLGCWIVVSL

SEQ ID NO: 228290 - protein, 183 aa, Zea Mays
MFSMQISFIRRSLPPHVLKIWRDITTPVQGELPQPPNAFGGQGMVPSLFTLHCLKLEKKIQSWLPEKVMYRPAFQQFMNYSSPHGGDPNANMNSTATRIAADLDTHQDFEPKSRSSDMPLHAAITQDIKENPVLIYMKGFPESPMCGFSALAVKVFQQYGVPTCGRDILGDLKLKESVKAHTQ

SEQ ID NO: 228291 - protein, 195 aa, Zea Mays
MGMGSARGGAGGWLPGERWRRVIFLALAAVSFLISLILLFLSAPRLRLPSVVLPYTTASASAVRRGPGEPPCLVYLLTGARGDGRRLLRLLLAVYHPRNRYVLHLSADAPDDERLSLATGVVAAAPAVGAFENVVIIGNPTAGTPVGSSGLAGTLRAAAVLLRLHADWDWFLTLNAADYPLVTQDGRATLASMHL

SEQ ID NO: 228292 - protein, 1233 aa, Zea Mays
MASGAARKRRRKSSPPAAAAAARDGRKLLVGEVVEVLSCDQGLRGSWHKAIVIGILENARAVRYTDFIDENGSPLVENVQVSDAIDGKSSMPEELIRGNIRPMCPHQALQVSHASYGLCVDALIESSYWEGVIADHAEGSMERKVLFPDEGDECIIEVDQLRLTQDWDEATGEWKPRGIWSFLQILLSHEERDGLPVSIRQIWFDLRSKPSFKTDAKMWMCGTEDFWERSLADVIAELWSLCDKPTLDGYQVEAVQKDTVETTVLDRLDPFQALSEYISCYRNNRKNALIKKEWAKQHLKSSGWTFLDDRPKNKFYISPDGKRFPSFLGACQACLAAKEANGYQYDHTENLHLDSMSLVHKNACYNQTHMDLALVKNKSNDKWITSPSRSWELVQLDAEFSPQIVSLLASYQDGTTVLQRTIDRTLSVKLKKHLLALGWSIKFKKDEIQENGHHKHTTRYRYESPYGKTYVSIIQVICSLIVGGVKQDDRPSYRTAAKGAHLTVSTGLARLNKRKRRDKTDALEKYIDYMKTDKQNSRRRKLLRSNAQKFLKSAGWNFWLKKKSRNKLELRYGAPHGKSYSSLVAACKGYLENGYQEDSDADIKIANHGSADGSMRPSKLIALSGGLKDSSKIQGMPVVDRCSNMFTLSAHHGKCRKRKPSSVSLNSARVLCSHGQIFPCRHHVKTVLSLLVEKNIVVPRDKVTYKRSDGPGIKEGSISRDGIKCMCCNELFTVENFEVHAGSSTPLPSAHMFLKDGRSLSQCLVEFMGGNKPRDPLHVRLKGSSSDLESDSICSVCHDGGDLLLCDNCPSSYHYDCVGLEAIPEGSWYCPSCRCGICNLSDYDPDISQFTEKTIVYCDQCEREYHVGCTRNSDHQLICRPEGCWFCSRGCSNVFQHLQEVIGKQVPTPIEGLSCTILKFCRANGSDHGDYDDEIMAEHYGKLCIAVDILHECFVTIIEPRTQSDISEDIVFNRESELRRLNFRGFYIILLQKGGELVSVGTFRICGQKFAELPLIGTRSLYRRQGMCRLLINELEKLLLDLGVERLLLPAVPELLQTWTCSFGFTVMSNSERLELAGNSILSFQGTTMCQKILNVAHNISQDRSIPSMSNSERMGLAENMVVKKAFIPLTVEPDHHVDLIVEPELVMKIENNSSEEGISSIDPLTSMPDPQVGLAVGPEMVPVSRENKDKEGICFIDAPTCPPDPQVDLTTGIHEQSFVRSVQRELHFEYNT

SEQ ID NO: 228293 - protein, 1262 aa, Zea Mays
MASGAARKRRRKSSPPAAAAAARDGRKLLVGEVVEVSAIRAVVCDEVHRIAAKGDGPRVMGRVLSCDQGLRGSWHKAIVIGILENARAVRYTDFIDENGSPLVENVQVSDAIDGKSSMPEELIRGNIRPMCPHQALQVSHASYGLCVDALIESSYWEGVIADHAEGSMERKVLFPDEGDECIIEVDQLRLTQDWDEATGEWKPRGIWSFLQILLSHEERDGLPVSIRQIWFDLRSKPSFKTDAKMWMCGTEDFWERSLADVIAELWSLCDKPTLDGYQVEAVQKDTVETTVLDRLDPFQALSEYISCYRNNRKNALIKKEWAKQHLKSSGWTFLDDRPKNKFYISPDGKRFPSFLGACQACLAAKEANGYQYDHTENLHLDSMSLVHKNACYNQTHMDLALVKNKSNDKWITSPSRSWELVQLDAEFSPQIVSLLASYQDGTTVLQRTIDRTLSVKLKKHLLALGWSIKFKKDEIQENGHHKHTTRYRYESPYGKTYVSIIQVICSLIVGGVKQDDRPSYRTAAKGAHLTVSTGLARLNKRKRRDKTDALEKYIDYMKTDKQNSRRRKLLRSNAQKFLKSAGWNFWLKKKSRNKLELRYGAPHGKSYSSLVAACKGYLENGYQEDSDADIKIANHGSADGSMRPSKLIALSGGLKDSSKIQGMPVVDRCSNMFTLSAHHGKCRKRKPSSVSLNSARVLCSHGQIFPCRHHVKTVLSLLVEKNIVVPRDKVTYKRSDGPGIKEGSISRDGIKCMCCNELFTVENFEVHAGSSTPLPSAHMFLKDGRSLSQCLVEFMGGNKPRDPLHVRLKGSSSDLESDSICSVCHDGGDLLLCDNCPSSYHYDCVGLEVEAIPEGSWYCPSCRCGICNLSDYDPDISQFTEKTIVYCDQCEREYHVGCTRNSDHQLICRPEGCWFCSRGCSNVFQHLQEVIGKQVPTPIEGLSCTILKFCRANGSDHGDYDDEIMAEHYGKLCIAVDILHECFVTIIEPRTQSDISEDIVFNRESELRRLNFRGFYIILLQKGGELVSVGTFRICGQKFAELPLIGTRSLYRRQGMCRLLINELEKLLLDLGVERLLLPAVPELLQTWTCSFGFTVMSNSERLELAGNSILSFQGTTMCQKILNVAHNISQDRSIPSMSNSERMGLAENMVVKKAFIPLTVEPDHHVDLIVEPELVMKIENNSSEEGISSIDPLTSMPDPQVGLAVGPEMVPVSRENKDKEGICFIDAPTCPPDPQVDLTTGIHEQSFVRSVQRELHFEYNT

SEQ ID NO: 228294 - protein, 804 aa, Zea Mays
MIVRTYRRRSRSISEGGGGVSSSQEAFDFDADVDVLGSSASQPLPPSQESSSMWDFDEDPPPSPPRPGKEGRRSGRGGARRGGGLELAEAPAMAPTVTLMEAEEYGEMMESVDDVTFALDGLRPAAQKRTRRASLLALLGICDSAERRRVLRSQGLVQQIIDAILVLDIDDPPCAIAAGALLFVLASDVQDNNLLSSETCVHFLLKLLNPPVNVVDAKAPSIGSKLLGISKFQMLNGSNKDVDSCSEDILLKVEEILLSCKEIKPADRDYKRTTRPELCSKWLALLTMEKACLSAVALEDTSDMVLELGGNFKETLRQLGGLDDIFNVMVNCHSELEKLVKDASTTVVEGKEGAPLQSTTLLLKCLKILENATFLSDNNKTHLLSMSRKLSPKCRSLSFVGVILNIVELLSALSLLQKPSTVSRKADPKNTKVCNGACSADSRGLSLLNHHCKCNNSKKKSILLNRRCQYCSSTKSEASHVTLSSSSDVSQSERILNCSSFSSNGTSSGSFGVKHINGASLKLNVRMDRSKAYPVRGSTGWISMKAQTSDWNSREMAKKRRLSENVRTDLSNGGDDPFAFDDIDQEPSNWDLFGPKRKSPQKRAKRTNGEVLDDCGTALMGSPKLCQPEDIYQSVATSGSKVVDESNLLEDCLLASVKVLMNLANDNPSGCEQIASCGGLNNMASLIIKHFPSFDFSMNSNNQMNESVSSGDPLSSQNSKSPQIKTKQLRDYELDFLVAILGLLVNLVEKDSLNRVRLANARVSVNLSQNPDSKEVQRDVIPLLCSIFLASQGTGETAEAISPV

SEQ ID NO: 228295 - protein, 803 aa, Zea Mays
MIVRTYRRRSRSISEGGGGVSSSQEAFDFDADVDVLGSSASQPLPPSQESSSMWDFDEDPPPSPPRPGKEGRRSGRGGARRGGGLELAEAPAMAPTVTLMEAEEYGEMMESVDDVTFALDGLRPAAQKRTRRASLLALLGICDSAERRRVLRSQGLVQQIIDAILVLDIDDPPCAIAAGALLFVLASDVQDNNLLSSETCVHFLLKLLNPPVNVVDAKAPSIGSKLLGISKFQMLNGSNKDVDSCSEDILLKVEEILLSCKEIKPADRDYKRTTRPELCSKWLALLTMEKACLSAVALEDTSDMVLELGGNFKETLRQLGGLDDIFNVMVNCHSELEKLVKDASTTVVEGKEGAPLQSTTLLLKCLKILENATFLSDNNKTHLLSMSRKLSPKCRSLSFVGVILNIVELLSALSLLQKPSTVSRKADPKNTKVCNGACSDSRGLSLLNHHCKCNNSKKKSILLNRRCQYCSSTKSEASHVTLSSSSDVSQSERILNCSSFSSNGTSSGSFGVKHINGASLKLNVRMDRSKAYPVRGSTGWISMKAQTSDWNSREMAKKRRLSENVRTDLSNGGDDPFAFDDIDQEPSNWDLFGPKRKSPQKRAKRTNGEVLDDCGTALMGSPKLCQPEDIYQSVATSGSKVVDESNLLEDCLLASVKVLMNLANDNPSGCEQIASCGGLNNMASLIIKHFPSFDFSMNSNNQMNESVSSGDPLSSQNSKSPQIKTKQLRDYELDFLVAILGLLVNLVEKDSLNRVRLANARVSVNLSQNPDSKEVQRDVIPLLCSIFLASQGTGETAEAISPV

SEQ ID NO: 228296 - protein, 291 aa, Zea Mays
MDRKPPERFRRRLIMKDGKFPYVDVIHASSISATTARSPRQPPASDPVRSTGTTSRWSASGAGFGRDWKKIEEHVGTKTTVQVQKLGLAAGLPPMYPRRHFAMQQQQQSSVAGGSSAVAMPLLHGRQPTCAPVAMPGLAKPDAVAHHGSIGWSSPSVVVPAANSGGGGKDARLGLGVGGRRFGSRGKYLVLHMQVDVFSFGIVLWKILTGEEPYANMHCGAIIDHVSFNTTMNYVEENCAPTVYTPELRYVCIAGRYIQGAPLLGNSTAASDEILAVDTPSEGGDAVIVSS

SEQ ID NO: 228297 - protein, 220 aa, Zea Mays
MASLLQVPRNQLHCHCDPLPPMALTFHRQNCSSSIPPMALTLNPHLLDPVLITILPLARRPTSPRALAVPREDTEVQCSAVLYSSAPRIFGTGQIGTNSTFIGSTKEQGDGPIVLIPAPTRELAVQIQEESTKFGSYSRTRSTCVYGGAPKGPQIRGLRRGVEIVIATPGRLIDMLEAGHTNLRRVTYLVLDEADQMLDMGNLKKLAAQSQTDDEDVWWE

SEQ ID NO: 228298 - protein, 921 aa, Zea Mays
MAAASASASLEDLKNENVDLESVPIQEVFAVLKSSPHGLTSTDGASRLEIFGPNKLEEKKGRPPDWQDFVGIVTLLFINSTISFIEENNAGNAAAALMASLAPQTKVLRDGKWSEQEAAILVPGDIISIKLGDIIPADARLLEGDPLKIDQSALTGESLPVNKMPGDSIYSGSTCKQGEIEAVVIATGVHTFFGKAAHLVDSTNNVGHFQKVLTAIGNFCICSIAVGMLVEIIVMYPIQHRQYREGIDNLLVLLIGGIPIAMPTVLSVTMAIGSHRLSEQGAITKRMTAIEEMAGMDVLCSDKTGTLTLNKLTVDKNLIEPFVKDLDKDAVVLYAARASRTENQDAIDASIVAMLADPSEARAGIQEVHFMPFNPVDKRTAITYIDSDGSWHRISKGAPEQIIELCRLREDLSRRVHAIIAKFADRGLRSLAVARQRVPEGNKDAPGTPWQFLAVLPLFDPPRHDSAETIRRALNLGVNVKMITGDQLAIGKETGRRLGMGTNMYPSSSLLKDGDTGGLPVDELIEKADGFAGVFPEHKYEIVRRLQERKHICGMTGDGVNDAPALKKADIGIAVADATDAARGASDIVLTEPGLSVIISAVLTSRAIFQRMKNYTIYAVSITIRVVLGFLLLALIWRFDFAPFMVLIIAVLNDGTIMTISKDRVKPSPVPDAWRLQEIFATGVVLGTYQALATVLFFWAVRDTAFFTNTFGVHHIGDSTEELMAAVYLQVSIISQALIFVTRARSWFFVERPGLLLVAAFLAAQLVATLIAVYAHWPFAKIKGIGWGWGGVIWLFTIVTFFPLDVFKFAIRYFLSGKQWNNVFDNKTAFASELDYGRGKREAQWAIAQRSLHGLQQPEASGLFNSDNSNDFIELSEIAEQAKRRAEIARLRELHTLKGHVESVVKLKGLDINTIQHNYTV

SEQ ID NO: 228299 - protein, 908 aa, Zea Mays
MAAASASASLEDLKNENVDLESVPIQEVFAVLKSSPHGLTSTDGASRLEIFGPNKLEEKKESKLLKFLGFMWNPLSWVMEAAAIMAIALANGGVLRDGKWSEQEAAILVPGDIISIKLGDIIPADARLLEGDPLKIDQSALTGESLPVNKMPGDSIYSGSTCKQGEIEAVVIATGVHTFFGKAAHLVDSTNNVGHFQKVLTAIGNFCICSIAVGMLVEIIVMYPIQHRQYREGIDNLLVLLIGGIPIAMPTVLSVTMAIGSHRLSEQGAITKRMTAIEEMAGMDVLCSDKTGTLTLNKLTVDKNLIEPFVKDLDKDAVVLYAARASRTENQDAIDASIVAMLADPSEARAGIQEVHFMPFNPVDKRTAITYIDSDGSWHRISKGAPEQIIELCRLREDLSRRVHAIIAKFADRGLRSLAVARQRVPEGNKDAPGTPWQFLAVLPLFDPPRHDSAETIRRALNLGVNVKMITGDQLAIGKETGRRLGMGTNMYPSSSLLKDGDTGGLPVDELIEKADGFAGVFPEHKYEIVRRLQERKHICGMTGDGVNDAPALKKADIGIAVADATDAARGASDIVLTEPGLSVIISAVLTSRAIFQRMKNYTIYAVSITIRVVLGFLLLALIWRFDFAPFMVLIIAVLNDGTIMTISKDRVKPSPVPDAWRLQEIFATGVVLGTYQALATVLFFWAVRDTAFFTNTFGVHHIGDSTEELMAAVYLQVSIISQALIFVTRARSWFFVERPGLLLVAAFLAAQLVATLIAVYAHWPFAKIKGIGWGWGGVIWLFTIVTFFPLDVFKFAIRYFLSGKQWNNVFDNKTAFASELDYGRGKREAQWAIAQRSLHGLQQPEASGLFNSDNSNDFIELSEIAEQAKRRAEIARLRELHTLKGHVESVVKLKGLDINTIQHNYTV

SEQ ID NO: 228300 - protein, 55 aa, Zea Mays
MVDQVHHALGEAGSGHWWNQRHRAVGCSIIAEQEHQVKVAPKRSRKGIILIWQVG

SEQ ID NO: 228301 - protein, 1085 aa, Zea Mays
MVRKKRTGPGGSGETSGESSGASGQGSSQQPERTQQPGGGRGWVPQQGGHGGGQHQGRDRHYQGRGGPGPHHLGSGAPEYHPREYQGRGGEYQGHGGEYQGRGGDYQGRGGGRSRGGMPQPYYGGHRGGNVGRNVPPGPSRTVPELHQAPYVQYPAPVVSPSPSGPGSSSQPMAEVSSGQVQQQFQQLADRGQSSTSQEIQVAPASSKSVRFPLRPGKGTYGDRCIVKANHFFAELPDKDLHQYDVSITPEVTSRGVNRAVMGELVTIYRQSHLGGRLPAYDGRKSLYTAGPLPFTSMAFEITLQDEEDSLGGRQGGHRRERVFRVVIKFAARADLHHLAMFLAGRQADAPQEALQVLDIVLRELPTARYSPVGRSFYSPNLGRRQKLGEGLESWRGFYQSIRPTQMGLSLNIDMSSTAFIEPLPVIDFVAQLLNRDISVRPLSDSDRVKIKKALRGVKVEVTHRGNMRRKYRISGLTSQATRELSFPVDDRGTVKTVVQYFMETYGFSIQHTTLPCLQVGNQQRPNYLPMEVCKIVEGQRYSKRLNEKQITALLKVTCQRPQERELDILQTVHHNAYYEDPYALEFGIRIDERLAAVEARVLPPPRLKYHDSGREKDVLPRVGQWNMMNKKMVNGGRVSNWACINFSRNVQDSAARGFSHELAVMCQISGMDFALEPVLPPVTARPEHVERALKARYQDAMNILRPQGRELDLLIVILPDNNGSLYGDLKRICETELGLVSQCCLTKHVFKMSKQYLANVALKINVKVGGRNTVLLDALSRRIPLVSDRPTIIFGADVTHPHPGEDSSPSIAAVVASQDWPEVTKYAGLVSAQAHRQELIQDLFKVWQDPQRRTVTGGMIKELLISFKRATGQKPQRIIFYRDGVSEGQFYQVLLYELDAIRKACASLEPNYQPPVTFVVVQKRHHTRLFANNHSDQRTVDRSGNILPGTVVDSKICHPTEFDFYLCSHAGIQGTSRPAHYHVLWDENKFTADELQTLTNNLCYTYARCTRSVSIVPPAYYAHLAAFRARFYMEPDTSDSGSLASGARGPPPGAARSSTRGAGSVEVRPLPALKENVKRVMFYC

SEQ ID NO: 228302 - protein, 581 aa, Zea Mays
METYGFSIQHTTLPCLQVGNQQRPNYLPMEVCKIVEGQRYSKRLNEKQITALLKVTCQRPQERELDILQTVHHNAYYEDPYALEFGIRIDERLAAVEARVLPPPRLKYHDSGREKDVLPRVGQWNMMNKKMVNGGRVSNWACINFSRNVQDSAARGFSHELAVMCQISGMDFALEPVLPPVTARPEHVERALKARYQDAMNILRPQGRELDLLIVILPDNNGSLYGDLKRICETELGLVSQCCLTKHVFKMSKQYLANVALKINVKVGGRNTVLLDALSRRIPLVSDRPTIIFGADVTHPHPGEDSSPSIAAVVASQDWPEVTKYAGLVSAQAHRQELIQDLFKVWQDPQRRTGTSHFFQEGNWTEAPEDHILQFLSFRDGVSEGQFYQVLLYELDAIRKACASLEPNYQPPVTFVVVQKRHHTRLFANNHSDQRTVDRSGNILPGTVVDSKICHPTEFDFYLCSHAGIQGTSRPAHYHVLWDENKFTADELQTLTNNLCYTYARCTRSVSIVPPAYYAHLAAFRARFYMEPDTSDSGSLASGARGPPPGAARSSTRGAGSVEVRPLPALKENVKRVMFYC

SEQ ID NO: 228303 - protein, 322 aa, Zea Mays
MAFGRRSPGSSRHPPALTIVTALLLASLYFAAAAAALSPTDAMHNNNWAVLVCTSRFWFNYRHMANTLSLYRTVKRLGIPDERIILMLADDMACNPRNSYPAQVFNNENHQLNLYGDNVEVDYRGYEVTVENFLRVLTGRHESAVPRSKRLLSDEGSHILLYMTGHGGDEFLKFQDSEELQSHDLADAVKQMKEKHRFKELLIMVDTCQAATLFSQLQSPGVLAIGSSMKGENSYSHHLDSDVGVSVVDRFTYYTLAFFEKLNMYSNASLNSLFTSYNPSMLLSTAYYRMDLYERPLNEVSWLRMTMKLQCPREITLMIISC

SEQ ID NO: 228304 - protein, 228 aa, Zea Mays
MAFGRRSPGSSRHPPALTIVTALLLASLYFAAAAAALSPTDAMHNNNWAVLVCTSRFWFNYRHMANTLSLYRTVKRLGIPDERIILMLADDMACNPRNSYPAQVFNNENHQLNLYGDNVEVDYRGYEVTVENFLRVLTGRHESAVPRSKRLLSDEGSHILLYMTGHGGDEFLKFQDSEELQSHDLADAVKQMKEKHRFKELLIMVDTCQAATLFSHFSHLVFWRLVVA

SEQ ID NO: 228305 - protein, 400 aa, Zea Mays
MAFGRRSPGSSRHPPALTIVTALLLASLYFAAAAAALSPTDAMHNNNWAVLVCTSRFWFNYRHMANTLSLYRTVKRLGIPDERIILMLADDMACNPRNSYPAQVFNNENHQLNLYGDNVEVDYRGYEVTVENFLRVLTGRHESAVPRSKRLLSDEGSHILLYMTGHGGDEFLKFQDSEELQSHDLADAVKQMKEKHRFKELLIMVDTCQAATLFSQSPGVLAIGSSMKGENSYSHHLDSDVGVSVVDRFTYYTLAFFEKLNMYSNASLNSLFTSYNPSMLLSTAYYRMDLYERPLNEVPVTNFFGSVMKTLHTDSAYTGFLAAHDNETPMSTGDNLDDHFMLKGRAIARRSTIEKEAQLTPHGWTEVLAEQLEGKNTDTVVMYGLGAMGILLALSTWLSM

SEQ ID NO: 228306 - protein, 356 aa, Zea Mays
MDPRQPSTRGHRSLLHAAIGAIGGVRPALRQESRRSPMDFSTAATPPTCTQHLSQHESTVGGENPSWMSDYSTTTSQGGYYTSVLNQEDANVFRSDVVEDLDNEVAELPGLNEINSQPIKRGRSKNFSEEEDLMLVSAYLNVSKDPITGRDQKEGTFWERVWKYFNKNRKFKSDRNWSSLKHRWLAIQKEVNIFQGYYDAIERKNQSGKTSDDKLAEAKAEFRETQHERAFSVFHVWMILRHEPKWPFKESKLKDPQETNNASSDAPINIDRPPGRKAEKEKARARKHGVCDVDGDPFFEELKKTRESREENDKDRKALDEKFYELEKIKVEAERDRQDKEIMQTDTSTMDDESKQ

SEQ ID NO: 228307 - protein, 68 aa, Zea Mays
MAWLNLISKSDNWNNSVACIGETTASAAKKLGLKSIYYPTTPGLEGWVESILEALRVHRTASKEAPKR

SEQ ID NO: 228308 - protein, 110 aa, Zea Mays
MYLHIWHLTRKKQCSLFTGWRCMINEAHTAQRVQYLINILTVRCFMFKPDDEVMALDCCQLGDEVRKQELKLDSPVYGPIYNGFTVNGKTTRRKVVSHRRIEEKEEKGLD

SEQ ID NO: 228309 - protein, 575 aa, Zea Mays
MAKGEGPAIGIDLGTTYSCVGVWQHDRVEIIANDQGNRTTPSYVAFTDTERLIGDAAKNQVAMNPTNTVFDAKRLIGRRFSDPSVQSDMKLWPFKVIPGPGDKPMIVVSYKVVTVPAYFNDSQRQATKDAGVIAGLNVMRIINEPTAAAIAYGLDKKASSSGEKNVLIFDLGGGTFDVSLLTIEEGIFEVKATAGDTHLGGEDFDNRMVNHFVQEFKRKHKKDISGNPRALRRLRTACERAKRTLSSTAQTTIEIDSLFEGIDFYSTITRARFEELNMDLFRKCMEPVEKCLRDAKMDKSSVHDVVLVGGSTRIPKVQQLLQDFFNGKELCKSINPDEAVAYGAAVQAAILSGEGNEKVFSTYSDNQPGVLIQVYEGERARTKDNNLLGKFELSGIPPAPRGVPQITVTFDIDANGILNVSAEDKTTGQKNKITITNDKGRLSKEEIEKMVQEAEKYKAEDEEVKKKVDAKNTLENYAYNMRNTIKDDKIASKLSADDKKKIEDAVDSATSWLDSNQLAEVDEFEDKMKELEGICNPIIAKMYQGAGAGMGDAAGMDEDAPSGGSGAGPKIEEVD

SEQ ID NO: 228310 - protein, 121 aa, Zea Mays
MSYLKEWSLVPSKVELVCRVCLVLLQTHHNQLTATPAARSLLTELKDILYCRVKECKDTIGFNLAAMDHIKELLALRSDAPFRDAKAKLMEIKKEQSKRSSSRLDGDEKRKKKRKKASAES

SEQ ID NO: 228311 - protein, 234 aa, Zea Mays
MHYVSLTMKVACTSRSLLECLVSSFFLFSFGSLSRKWRHVFGVPIAVLAFIVGGKNRSKEGTRRRKVWQGRAGRLMMRDEVDGRPAGPWTGVAGCLSGWELELEQTQVAVRYLLPSRSRGVAQLQTLAGQQSIDVVGRDERGTRAGWDWDAGWPGLRIWWILESGGHAAGAGDVIMRAVQGQQVGLGGAEPRRSTAAPTECARHRRPAGQSDVHRHPVRCVSATATDPFFLPFG

SEQ ID NO: 228312 - protein, 234 aa, Zea Mays; identical to SEQ ID NO: 228311

SEQ ID NO: 228313 - protein, 196 aa, Zea Mays
MTKSGALQLARSTGGSLSKDQVKSAVDQYVKYHDLHGGEQESRKSNYADLANKYYDLVTGFYEYGWGDSFHFAGGYPGETSREAIKRHQHFMALQLGLKKGMKVLDVGCGIGGPLIEIARFSSTSITGLTNNDYHVSRGKEHIFSAGLSEQCCSLKGDFMNMPIADNTFDAAYAIQATCYAPEAVCLPSYLCPSQS

SEQ ID NO: 228314 - protein, 556 aa, Zea Mays
MTTTKTTQKMKTMVQVVGSPGLWWPKEQGSRVMILHQEDELDGQVAPYHLMEKRDLAKSILLELEHEHHLKVQEEVRSKLASLEVCHQNEIRRTISAFARLQKYAESRKEIDRRLDVHFQRRIEQHLRHQAFLILFQYLYPNAEVLDKHLSMVQRDHEQKSQIVERRIRDDAALEEAKRKEQAVKEEKLRQERAQQEAEARQKEAAKLAAEARKTAFEAAKKEAAEKEAAEKEAAKLRDAAASQPSPNSQNNTAEGIKVFGDKYALEAESRRHALVQNQVPENIHHSKEFSKYDRQIAKSISKLMPTTDSVRTRASELVKALNGQDCPRPISCCLFANKIISIVKSRNTKDKTFGNLAFACGYVMLLVTNQVPDAMDYLLAEFNRVCIYTVPKHMHALNAQARNRDYYRLIGYQEENGQLESTESYLTYVVAYVKLYAAMIQTEIKGVRHPHGLAEGWKWLAMFLNSLPATTATACALHAFLKMAGFALHKKYGSQFMKILDVISRCFLPALKEQGNKMQAEAVNNLQNYLNDKIYLEEPEGQYLVQQLLSKELFM

SEQ ID NO: 228315 - protein, 537 aa, Zea Mays
MATPCRSRGFERVELRCPRELDPRPSWTLGDVLAELDALDATRRAAPPTPLKQPPDWANGGGEKAFVMRVDDDDEDDTEDEDDGTSGGKSRALVAKGARFSCNDLASSDSEDELDGQVAPYHLMEKRDLAKSILLELEHEHHLKVQEEVRSKLASLEVCHQNEIRRTISAFARLQKYAESRKEIDRRLDVHFQRRIAEVLDKHLSMVQRDHEQKSQIVERRIRDDAALEEAKRKEQAVKEEKLRQERAQQEAEARQKEAAKLAAEARKTAFEAAKKEAAEKEAAEKEAAKLRDAAASQPSPNSQNNTAGIKVFGDKYALEAESRRHALVQNQVPENIHHSKEFSKYDRQIAKSISKLMPTTDSVRTRASELVKALNGQDCPRPISCCLFANKIISIVKSRNTKDKTFGNLAFACGYVMLLVTNQVPDAMDYLLAEFNRVCIYTVPKHMHALNAQARNRDYYRLIGYQEENGQLESTESYLTYVVAYVKLYAAMIQTEIKGVRHPHGLAEGWKWLAMFLNSLPATTATACALHAFLKL

SEQ ID NO: 228316 - protein, 531 aa, Zea Mays
MGFERVELRCPRELDPRPSWTLGDVLAELDALDATRRAAPPTPLKQPPDWANGGGEKAFVMRVDDDDEDDTEDEDDGTSGGKSRALVAKGARFSCNDLASSDSEDELDGQVAPYHLMEKRDLAKSILLELEHEHHLKVQEEVRSKLASLEVCHQNEIRRTISAFARLQKYAESRKEIDRRLDVHFQRRIAEVLDKHLSMVQRDHEQKSQIVERRIRDDAALEEAKRKEQAVKEEKLRQERAQQEAEARQKEAAKLAAEARKTAFEAAKKEAAEKEAAEKEAAKLRDAAASQPSPNSQNNTAEGIKVFGDKYALEAESRRHALVQNQVPENIHHSKEFSKYDRQIAKSISKLMPTTDSVRTRASELVKALNGQDCPRPISCCLFANKIISIVKSRNTKDKTFGNLAFACGYVMLLVTNQVPDAMDYLLAEFNRVCIYTVPKHMHALNAQARNRDYYRLIGYQEENGQLESTESYLTYVVAYVKLYAAMIQTEIKGVRHPHGLAEGWKWLAMFLNSLPATTATACALHAFLKL

SEQ ID NO: 228317 - protein, 119 aa, Zea Mays
MEEEAPPMELVREKKLSEKIRLCKMEVLKKSHTSVEDSDHIFLESSGLQDGLSCKKDLHSCGTKASDEEISDRLQENHDNTQPSDNHNYSVDQTQLPFLQALLRVQMKRRGHQTYRSMN

SEQ ID NO: 228318 - protein, 229 aa, Zea Mays
MAERGGERGGERGGFGRGFGRGGRGDRGGRRGGRRGPRQEEEKWVPVTKLGRLVKENKITKIEEIYLHSLPVKEHQIVETLVPGLKDEVMKITPVQKQTRAGQRTRFKAFVVVGDGDGHVGLGVKCAKEVATAIRGAIILAKLSVVPVRRGYWGNKIGQPHTVPCKVTGKCGSVTVRMVPAPRGSGIVAARVPKKVLQFAGIEDVFTSSRGSTKTLGNFVKSHVQVIWF

SEQ ID NO: 228319 - protein, 293 aa, Zea Mays
MLSGVDHDVPDGIGMARLAWTRLPTADGEGAGPSTSEAADDELLSGAAIESLDYEVIENYAYREEQAQRSKFWVPYYVMLKWLFALLIGVGTGLAAIFINLAVENFSGWKYTATFAIIKHSYFVGFFVYTVFNLALVFSSVYIVTNFAPAAAGSGIPEIKGYLNGVDTHGILLFRTLVGKIFGSIGSVGGGLALGKEGPLVHTGACIASLLGQGGSAKYHLSSSWSCCCLQSSCWWGTICLGGSYFLVEKSSYVESILHICRGGRCGAFSHELVQQWKMRSFWSWRFYNMGHI

SEQ ID NO: 228320 - protein, 420 aa, Zea Mays
MEVELPNIHKATSSDHWSLTSSQYPSGKFPKVSVGIMIPKAGSIPRARGGDATPTPTFDRNLSQGTDGLSRPKGDNTSLRVSQEALNHDVSTEGAPKADPVTKVSVSQPDDNTCEQTGTFSFGTRREQGISVEKLETPEFLSSQRKRNTESADKAKPNSEMLRMKLWEILGGTSQNKQAAASPNPDDMETPDQPKGQTVKGPSSGNKEVFTSPFLDNIKTPDPLKRQTVNFTKCKLSLDPIESDSDSPKVDERRPVTRSLGRKKALASSKKQSRSSKKPLSTFQSTPKKKMLDNVFIFNEKCTPKTVDQGETNKATESRGSRSPDSAKKRVNRKQPYLSPTEDEGIKSSETSFAKGYKSHKWPSDIDVPDKSPVEHMGRKSNLKEDRMSKRRLSSAAPFPTQHKKILILIKNKNNARKTS

SEQ ID NO: 228321 - protein, 278 aa, Zea Mays
MNRFPDRGFVRLRNRAYGTYLFADDDGAGVMLKPHRASLQAVWQVDRVVRRGRGYIVLRSAAYGRHLICATGTSWVDQSHEAYHTVQGNYNNPEQVDILWAPVHRLDNVHVVMLQGLDCQRILRACAPNTPFFRYVFVDAFQRSTNYGTMADWTVETIPVRPAPTVIPLPVPPLTEGVTPLIVLRRIKYVRADANGLFNPGAWLSWLFVGNSLLQLKQDLEMLLNVSNITMYVRAGPFARWTPLVIDLPSHPADMEIFVMTAMTPAMSIILAHPDFDA

SEQ ID NO: 228322 - protein, 169 aa, Zea Mays
MPYGHVGCLCRVTREGKERRKRWAQRRTSSKPDKKAPKEVEDEDTKKSEEHEETNTMPGMLPTSVIEILAAREKQTFASDSEEENVKQKVQRRKKRMKTDGCWSVRPETILLKDVRSTQHVKNALDFLEHRKNRVPRSNAVLKNASKALRLLSSKDMVKRLRTNVLEWN

SEQ ID NO: 228323 - protein, 237 aa, Zea Mays
MAADVGVVMVSAWSVSFQIALKGATAEGTVITKALGSAGRVLDGPQAELVPGAAATRLAVETKHVKLVEAALNCLHDVTRSTSARPLPGQNFRSRNNCVDPPNTAAAVNAYADLNHSWMDTIEKVVRRKEEAVGEEGDMERPTLLSEALRMPQPTAFVSVQLSDGQPTPSNVSKKKMDGGEVLFLYGVGEVAVTIGRNSLSPQPLHPGSSIVIVVIESDRGDDDGLSEALMLGVGCK

SEQ ID NO: 228324 - protein, 63 aa, Zea Mays
MLVHISTAKQLHLVYLEKNPGVTLLVSLICRDMPVRSSLAGSCIMKWMQLERRVPAWKRATFL

SEQ ID NO: 228325 - protein, 279 aa, Zea Mays
MAHQSPRPRPSFNSAPIIPPAATNQRRIPPEAFLQWRVEGRLLLIGATTDDTMAPPDAPLPATRKPDIVGVLAPTDLACLPQDCRRSPPSPSRRAMPAVIPASARPTSTNLLCRCPPAHRHPSPAAATDDLPRPPQGGFCKRACRGSYRRARRGTRTRRRPRGCWRTSSPSRSTLGPPTRSFWPRNGGGDAAPSRPSAGGRTNEFHAATLHLPRRRCPPRTCDRFLPDKAIDLIDEAGSRVRLRHAQLPDEAKELDKELRQISKQKNKAVRGQDFEKNL

SEQ ID NO: 228326 - protein, 235 aa, Zea Mays
MAHQSPRPRPSFNSAPIIPPAATNQRRIPPEAFLQWRVEGRLLLIGATTDDTMAPPDAPLPATRKPDIVGVLAPTDLACLPQDCRRSPPSPSRRAMPAVIPASARPTSTNLLCRCPPAHRHPSPAAATDDLPRPPQGGFCKRACRGSYRRARRGTRTRRRPRGCWRTSSPSRSTLGPPTRSFWPRNGGGDAAPSRPSAGGRTNEFHAATLHLPRRRCPPRTCALVPQHWMGIGSI

SEQ ID NO: 228327 - protein, 235 aa, Zea Mays
MGNARRPAADSAAASDREVGFAKLHGECFEYYMQTYSIVLGRHSRRRSKGPVAAPPEADDGVDVDLGALGAGMNVSRRHARIFYDFLRRRFALEVLGKNGCLVEGVHHVPGSAPVKLDSQDLLQMGDTKFYFLLPSRSVFDAGITRRSSAVQRAIPPPPSDDDEDEDEHEEAVAAAKRRRDGYNGSKSYREADDQLLLQLEEKDVISSAATILSDLCGPQEWISINKLHEVIFML

SEQ ID NO: 228328 - protein, 1139 aa, Zea Mays
MQRPRRCRPAAPSPRAASHRSPRHRRRGEGAGSACAVLEPLRPDQLPHRRRRRETAVNKLGSCSAARTRLPSSKDKGHQAERMGSGSSKSEFEDFHANAVEEAVKNLAPYLEDTRVRNQAIYFDGWDGLGASAVLNSIAERPPPSLRNKFDDIILHIDCSRWKSRRALQRTIAQKLGLPQHVMAVFDRQDEEDDLVGVHEGSRTEIRDIGREIYRVLQRQSFLVVFHNGSDTMVDFNDFGIPRAAADPWSNIIRKVLWTFRGRLHAIKETEEVSGHLKPDKRQPKGTETVDTSYLCFRSLFSGGPSDVSSYRLQILCEEAAAIAQYTNNPIVTQEIAEICCRYLLSLNSKGNGKLDFNWSAHASNYWVCDGILNECQPEQAWEIAASLHKELRLEGYSSARKFCHPGADTTSWVVTIKSSEDIVPTVKPETTSFFLAVKRKHGHSVLPLPMKMFQRSEQLHVLKLYHCSFSFASPPFLCCLNLRFLGLDSCTDHQSMKPKENKEEESEEAGAEGEEENTATIEFFQSLWVLDICCTDWELTLSPNTIVKMATNIREINIKRGRIWHSSISWRFLGNIHKLRVIEPTSPWETSNKDEFMDMVKLELLDLSGNTTIQFLPSLSGAISLRTLILDGCIELQHVVPETLPPWLETFSFDGGYKQAKISCISLAGCARLVNFRLCGSVQNLEELDLSNTSIKTLDLSDKVVQVPCLERIILLGCERLRAVLWPKDGMPNLMVLGIDTRGGAEAASAKTVHDNFAISKEREEGCRAFVAVMEMRFLQSLVLASSNKLCWDTDRKYDLNICLSSSRSSSKGVGQHSYKEETMGPLQKSMITSKTYLTYSDVNIDKAGSVRQFQPLHRHVEIGEGISNSSMVTVREISAAILLINRVYSLLVHDNSSIRTVIPENIMSIDTKKVYWSCLRWCCVERCPSLDSVFATNYDAVCFNALETFWAADLLVARCIWSKGRTTNVKDTESFAKLQAIHLHSCPRLAFVLPLSWFYTLSSLETLHIVYCDNLGQVFPVEAEFLNEISTGHPGGLLEFPKLKHIWLQELPKLQQICEAKMFAPELRTITLRGCWSLKRLPATADRPGDRPVVDCEKNLWAKLEWDGKEAGHHPCLFEPRHSKYHKKRVLRTTLLR

SEQ ID NO: 228329 - protein, 299 aa, Zea Mays
MDMPLLNAYLDSLGTPSFRTGVNFAQAGCSITPAKPTSVSPFSFGLQIKQFFAFKNKVTKLLSEGDMHSRYIPQQDYFSEGLYTFDIGQNDLAGEFYSRTEDQVIASIPTILLEFENGLKKLYDQGARKFWIHNTGPLGCLPQNIALFGKDPSQLDELHCVAKHNRAAKLFNLQLHALCTKLRAEFDGASITYVDIHTIKYSLIANYSRYGFEHATQACCGYGGPPLNYDGNVPCGHTVSLDGKMVTAKGCSDTTEFVNWDGIHYTEAANFHIASQILTGKYSDPPFVDKMPFVIKPRF

SEQ ID NO: 228330 - protein, 161 aa, Zea Mays
MASPSDTPDSNQICLVSAAPAPTLLQSFKHQQPPPPPLPPRSSPGVVASSTTSYHSRAESGVKQGAGQESPNGLSCRGHAFLCAAPHRGAALPRRRRWRPRDGVHRIQLPGGVQLRGLQLRHRRARGRRLRVHLPALRLQLLRRARRPLLRRPPRHRLPQE

SEQ ID NO: 228331 - protein, 302 aa, Zea Mays
MEAMDMPLLNAYLDSLGTPSFRTGVNFAQAGCSITPAKPTSVSPFSFGLQIKQFFAFKNKVTKLLSEGDMHSRYIPQQDYFSEGLYTFDIGQNDLAGEFYSRTEDQVIASIPTILLEFENGLKKLYDQGARKFWIHNTGPLGCLPQNIALFGKDPSQLDELHCVAKHNRAAKLFNLQLHALCTKLRAEFDGASITYVDIHTIKYSLIANYSRYGFEHATQACCGYGGPPLNYDGNVPCGHTVSLDGKMVTAKGCSDTTEFVNWDGIHYTEAANFHIASQILTGKYSDPPFVDKMPFVIKPRF

SEQ ID NO: 228332 - protein, 299 aa, Zea Mays; identical to SEQ ID NO: 228329

SEQ ID NO: 228333 - protein, 98 aa, Zea Mays
MDMPLLNAYLDSLGTPSFRTGVNFAQAGCSITPAKPTSVSPFSFGLQIKQFFAFKNKVTKLLSEGDMHSRYIPQQDYFSEGLYTFDIGQNDLAELPMP

SEQ ID NO: 228334 - protein, 345 aa, Zea Mays
MLTPWSTIPRLSLRSAAPTPSTLPPSWPSAQSATLIDAAINSGNSGGPAFNDRGKCVGIAFQSLKHEDAENIGYVIPTPVITHFIEDYKKSGEYTGFPILGVEWQKMENPDLRKAMGMKPDQKGVRVRRVEPTAPESGCLRPSDIILSFDGVDIANDGTVPFRHGERIGFSYLVSQKYTGEKALVKVLRDSKVHEFKIRLATHKRLVAAHVKGRPPSYYIVAGFVFAAISVPYLRSEYGKDYEYDAPVKLLVKHLHAMAESPDEQLVVVSQVLVSDINIGYEEIVNTQVLAFNGQPVKNLKNLATMVENCKDEFLKFDLEYDQAATQDILTTHCIPSATSDDLKA

SEQ ID NO: 228335 - protein, 421 aa, Zea Mays
MDDPSSASNKHKRKRGRKPKASPPFPDRSSPSPSAAPAPAGRRGRKPRRHEAPADADATRPPSPPRRGEPKPVANGGDVVAVAESGPASWDEVVRVVPCMDAVVKVFCVHTEPNFSLPWQRKRQYSSSSSGFIIGGRRVLTNAHSVEHYTQVKLKKRGSDTKYLATVLAIGTECDIALLTVNDDEFWEGVSPVEFGTLPALQDAVTVVGYPIGGDTISVTSGVVSRIEILSYVHGSTELLGLQIDAAINSGNSGGPAFNDRGKCVGIAFQSLKHEDAENIGYVIPTPVITHFIEDYKKSGEYTGFPILGVEWQKMENPDLRKAMGMKPDQKGVRVRRVEPTAPESGCLRPSDIILSFDGVDIANDGTVPFRHGERIGFSYLVSQKYTGEKALVKVLRDSKVHEFKISMEKIMNMMHLSSCW

SEQ ID NO: 228336 - protein, 558 aa, Zea Mays
MDDPSSASNKHKRKRGRKPKASPPFPDRSSPSPSAAPAPAGRRGRKPRRHEAPADADATRPPSPPRRGEPKPVANGGDVVAVAESGPASWDEVVRVVPCMDAVVKVFCVHTEPNFSLPWQRKRQYSSSSSGFIIGGRRVLTNAHSVEHYTQVKLKKRGSDTKYLATVLAIGTECDIALLTVNDDEFWEGVSPVEFGTLPALQDAVTVVGYPIGGDTISVTSGVVSRIEILSYVHGSTELLGLQIDAAINSGNSGGPAFNDRGKCVGIAFQSLKHEDAENIGYVIPTPVITHFIEDYKKSGEYTGFPILGVEWQKMENPDLRKAMGMKPDQKGVRVRRVEPTAPESGCLRPSDIILSFDGVDIANDGTVPFRHGERIGFSYLVSQKYTGEKALVKVLRDSKVHEFKIRLATHKRLVAAHVKGRPPSYYIVAGFVFAAISVPYLRSEYGKDYEYDAPVKLLVKHLHAMAESPDEQLVVVSQVLVSDINIGYEEIVNTQVLAFNGQPVKNLKNLATMVENCKDEFLKFDLEYDQLIKAFLMDTNIWSLVGSFPPQITFAPL

SEQ ID NO: 228337 - protein, 286 aa, Zea Mays
MAISCFNGGAGWPEPVVRVQAVSDTCGDTIPERYVKPLSERPRLSPASDGSGPNIPVVDLSMLDVDATSSAVAAACREWGFFQAVNHGVRPELLRGARAAWRGFFRQPAEVRERYANSPATYEGYGSRLGTAKGGPLDWGDYYFLHLLPASLKSHEKWPSLPSSLRGATEEYGEEVLQLCRRVMRLLSSGLGLEAGRLQAAFGGEGGEGACLRVNFYPQCPQPELTLGVAGHSDPGGMTMLLVDDHVKGLQVRSPDGQWIVVEPVPDAFIVNVGDQIQDQHGGIKK

SEQ ID NO: 228338 - protein, 573 aa, Zea Mays
MGWSPRPPPITRSTASLRLVPHFSHFRFSFHRAQESRGGGGSRRRTLRCCGGTAPAAAAGAAEGRMAAATAADMVWVRVLEDGVFRFDASEAARAAAGPSLSFADPRRREAPHDGADMPAVVPVCEVAAGGSQKVVIKLPPGTSFYGTGEASGPLERTGKRVFTWNTDAWGFGPGTTSLYQSHPWVLAVLPDGKALGVLADTTRRCEIDLRQESTIKFSALSAYPVITFGPFNTPADVMTSLSHAIGTVSMPPKWSLGYHQCRWSYDSSEKVLKVVRTFREKDIPCDVVWMDIDYMDGFRCFTFDSIRFPDPISMVDDLHSIGCKAIWMLDPGIKKEEGYFVYDSGSKSDVWIQKADGSPFVGEVWPGDCVFPDYTSEKTRAWWASLVKDFISIGVDGIWNDMNEPAVFKTTTKTMPESNIHRGDADIGGVQNHSYYHNVYGMLMARSTYKGMEMGNAAKRPFVLTRAGFIGSQRYAATWTGDNLSNWEHLHMSLPMVLQLGLSGQPLSGPDIGGFAGNATPKLFGRWMGVGALFPFSRGHTETGSIDHEPWSFGKECEEVCRLALLRRYTRP

SEQ ID NO: 228339 - protein, 301 aa, Zea Mays
MKFKEAALSEKLTNFIQGSARNLESAYEFHNDCHPLNQTPTTAGDLSISEEIPLIEPIVDTKSPESLSDAITSDNSILDKSIRCLPGTTSRQYRQLEDGGFHTVRKLLQHFPRTYADLQNPQGPIEYGQYIMLSGTVISSRGIKVKSTLGLLEVVVGCSIIESELSSSVESSHSGAEQKRIHLHLNRFFSGARFSSQHFLNLMSAKHKEGDLVYVSGKIKKVLANGHYELKEYTIDAIEGEGEHSTMLARKPHPIYPSKAGLKPSLLGLSISRALKILSPDVDPVPPDVLVEFNLPNLFDQ

SEQ ID NO: 228340 - protein, 827 aa, Zea Mays
MGEHSHMSAELDNVVSAVLENYESPYANADNDAAVEDIRTQWVDEVLKAEGHEPPAVTILTRVPSWKVIRAVHGELSLTIEESTSPNFWSGICLHNLARISRETTTTRRVLEAIFRYFDNNNLWSPSKGFALCVLLDMQIVMEKSGQNAHILLSMLVKHLEHKNVLKQPDMNLDIIEVTSRLAEHSKAQSSIALMSSISDMVRHMGKSMQSLASDAGPGDNMVKWNSRYGKAVDECLVQLSRKVGDAGPILDTLAVVLENISSSMIVARSTISAAYRTAQIVASLPNLSHQSKAFPEALFHQLLLAMLYPDCETHLGAHRIFSVVLVPSSVAPFSFADTSQTRKIDLRRTLSRTTSVFSSSAALFGKLKRDMLSFRESALQDNTKLLPISENANEISANDAKLFKSQTIQRMVSTRDISLPSSTDTSTSSEPTSYQEKDAVTLMLSVRQANLLLSSLWTQALSPENVPRNYEAISHTYSLMLLFSRAKGSGAEVLVGSFQLAFSLRSVSLQAGFLPPSRRRSLFTLATSMLVFFSKAFNVLALIPVVKQVLTESTVDPFLCLIEDCRLQALDSANESCTKLYGSKEDDELALKSLSNIDMNENQSKETSVPLILDSLEDMSESELSAIRKQLLEEFSADDSCLGSHFTETPSQYPAQNGKLHHKSMEVIPLGFVFEDDTLAEASDSSVEPHLQHPPCNNILDVNRLLDSVLETSQHVGRSSVSTNQDLPFKDVANQCEALLIGKQQKLSACMSVCEKEAGESSVEQSSRQDPQADTFLCTADEQWHPNSWPACRCVFNPKPGVMKVSWTELKNSLYKPEDLVMSHQG

SEQ ID NO: 228341 - protein, 493 aa, Zea Mays
MIVARSTISAAYRTAQIVASLPNLSHQSKAFPEALFHQLLLAMLYPDCETHLGAHRIFSVVLVPSSVAPFSFADTSQTRKIDLRRTLSRTTSVFSSSAALFGKLKRDMLSFRESALQDNTKLLPISENANEISANDAKLFKSQTIQRMVSTRDISLPSSTDTSTSSEPTSYQEKGSGAEVLVGSFQLAFSLRSVSLQAGFLPPSRRRSLFTLATSMLVFFSKAFNVLALIPVVKQVLTESTVDPFLCLIEDCRLQALDSANESCTKLYGSKEDDELALKSLSNIDMNENQSKETSVPLILDSLEDMSESELSAIRKQLLEEFSADDSCLGSHFTETPSQYPAQNGKLHHKSMEVIPLGFVFEDDTLAEASDSSVEPHLQHPPCNNILDVNRLLDSVLETSQHVGRSSVSTNQDLPFKDVANQCEALLIGKQQKLSACMSVCEKEAGESSVEQSSRQDPQADTFLCTADEQWHPNSCKLPALCPYDRFLATSGC

SEQ ID NO: 228342 - protein, 456 aa, Zea Mays
MLSFRESALQDNTKLLPISENANEISANDAKLFKSQTIQRMVSTRDISLPSSTDTSTSSEPTSYQEKDAVTLMLSVRQANLLLSSLWTQALSPENVPRNYEAISHTYSLMLLFSRAKGSGAEVLVGSFQLAFSLRSVSLQAGFLPPSRRRSLFTLATSMLVFFSKAFNVLALIPVVKQVLTESTVDPFLCLIEDCRLQALDSANESCTKLYGSKEDDELALKSLSNIDMNENQSKETSVPLILDSLEDMSESELSAIRKQLLEEFSADDSCLGSHFTETPSQYPAQNGKLHHKSMEVIPLGFVFEDDTLAEASDSSVEPHLQHPPCNNILDVNRLLDSVLETSQHVGRSSVSTNQDLPFKDVANQCEALLIGKQQKLSACMSVCEKEAGESSVEQSSRQDPQADTFLCTADEQWHPNSWPACRCVFNPKPGVMKVSWTELKNSLYKPEDLVMSHQG

SEQ ID NO: 228343 - protein, 278 aa, Zea Mays
MLVFFSKAFNVLALIPVVKQVLTESTVDPFLCLIEDCRLQALDSANESCTKLYGSKEDDELALKSLSNIDMNENQSKETSVPLILDSLEDMSESELSAIRKQLLEEFSADDSCLGSHFTETPSQYPAQNGKLHHKSMEVIPLGFVFEDDTLAEASDSSVEPHLQHPPCNNILDVNRLLDSVLETSQHVGRSSVSTNQDLPFKDVANQCEALLIGKQQKLSACMSVCEKEAGESSVEQSSRQDPQADTFLCTADEQWHPNSCKLPALCPYDRFLATSGC

SEQ ID NO: 228344 - protein, 135 aa, Zea Mays
MWPLLRIDMHLACILSQVLAISVATAMGCYHIRPYLRVASLVFGLKQNAIAQLRERTEGRREGLAGDLRSGLDVGAQFLAGQCRAYTEKVALSPVKSGGRAAQNASSALREVMGSYTNAIRRRLRLDQRVRLRAT

SEQ ID NO: 228345 - protein, 74 aa, Zea Mays
MKVAITVSGGGGGGSSSADNTATPSGPSVRATNTKPASGGATTTDESDSSAAGSGARLAMGLLFGAAGLAAIMG

SEQ ID NO: 228346 - protein, 367 aa, Zea Mays
MIICKKHDGHATGHDNHVTESRASIEQHGSVSKDGISVEGGTVDELPQESAAPTIEKDSSPDNPEGLSREELGRMVASRWTGESVTEVSKDDKKGHEDQQEIPEPAEEALEDELEIPEPAEENYGGYHSEVEDDRRKYEDEEFYHESEDEYVDDHDEHVESYKSDDDQKDLTEPGHASWLDKVQQTVQNVFQKFNSFKTPVDLSEASHVRKEYDDASSKLSKIQSKISSLAEKLKHDFGNDKEFYSFYDQCFETKEGKYTYKVCAYKKASQAEGHSSTNLGRWDKFEDSYRVMHFSSGDKCWNGPDRSLKVRLRCGLSNELNDVDEPSRCEYVAVLSTPAVCVEEKLKELQNKLDAMSLKQPGHDEL

SEQ ID NO: 228347 - protein, 115 aa, Zea Mays
MRNGEVDIMEDMDMEVGMVVDMENRAMVVDMVEDTGPNMAGATGPDMDTVAGMVEDTVAVMVGDMVAVVAMEKVEALEVGMVVVAILVVEGTMVVEGTMVDGIKKHCYIKFLYVR

SEQ ID NO: 228348 - protein, 94 aa, Zea Mays
MSGASAQEELSMWHHLWLRHSGLRDAEGLYLASDSNKRLLIYFPFMQVKLHSVLFKGPKDDGLPVLMDLCLFGTLPLLMGNRFFWSRVNYILFC

SEQ ID NO: 228349 - protein, 419 aa, Zea Mays
MTNGLPESNGYIYVEANGGLNQQRTSICNAVAIAGFLNATLIIPNFHFHSIWRDPSKFSDIYDKDHFVQRLQNDVRVVDKIPDFIMEQFGHNLSNVFNFKIKAWARIRYYNDVVLPKLVEERFIRISPFANRLSFDAPFAVQRLRCLANFEALKFSKPIVSLSETLISRMRERSVESDGKYISVHLRFEEDMIAFSCCVYDGGDEEKKEMDAAREIGWRGKFTKRGRVIRPGIIRMNGKCPLTPLEVGLMLRGMGFSNKTAIFLASGKIYKAEKNMASLLEMFPLLQTKETLASEEELAPFKNFSSRMAAVDYSICAQSEVFVTTQGGNFPHFLMGHRRYLYGGHSKTIKPDKRRLAVLLDNPRIGWKALKRHLLNMRAHSDAKGIEMKRPNESIYTFPCPDCMCRLNRTEHSKSKQSR

SEQ ID NO: 228350 - protein, 55 aa, Zea Mays
MIRDQQEKAQLERNMRERDAANTRKLMERQLSKEEQEELTRKSQAMDNNDTSDLR

SEQ ID NO: 228351 - protein, 133 aa, Zea Mays
MPLWPHTRGIAMTIVSPPLTQSLLQGCRISTVAREGVHNMRSPLSSASAPCNNRNSVSFVDEDDDRPAFGFDGNKKKLCLVMGLHDGSAKVQTGISLNTLGSLGYEMDHGWRRRWRKYDPTAHNLDTSAISIE

SEQ ID NO: 228352 - protein, 133 aa, Zea Mays; identical to SEQ ID NO: 228351

SEQ ID NO: 228353 - protein, 141 aa, Zea Mays
MSLVVQQSTIHLTKPLFDNSSYFEVIKFPGGITIIPPQTAFLLQKPHATFNFTLNYPIYKLQDRTNELKDQMEAALLLNPYEICSFDLQLFACPAALSRSYRWTSPCSCTSCVRRRKKLMADQIPECNKFQIIRWLTFFSN

SEQ ID NO: 228354 - protein, 81 aa, Zea Mays
MKDLSSPCSARPPVDIPVLCCRSVCPCLIVASSSILNYFVFPFLIERLDLDEYGFHIFKIHITGFGVGGLQSTERCETWAS

SEQ ID NO: 228355 - protein, 210 aa, Zea Mays
MCRFMVMGSNRLLSSQLLDESSSDDDEDFILSAAQIIHTVSQVRRNPGGSVPGRAYIYRDREAGHARLYQDYLADIPTYGPNLFRRSWLQLNWCFRYILTSFKSSIDKIGKNQTFITTTYMEAQMCNPVAIATSKSSLQSTSQLFSEALSDKLKRQSMKLRQCHQIRVLTRQFLQEMVKKNIKGFQAVQTQMTLKHVQQIKYQTIESVRS

SEQ ID NO: 228356 - protein, 385 aa, Zea Mays
MTDRNPAAASSKRHCDLSLDDPTPSAKLQRCSEPSEPTPAGKPNGGAATGEESEMMAGARNPRAQRYLVAVEYIGTRFSGSQKQPNQRTVTGVLEEAFHRFIGQPVSIIFSSRTDAGVHALSNVCHVDVERISKRKPGELTPHEPGVVKRAVNHFLLKSEGDIMVTDVCCVAPDFHARYKSLERTYHYRLLAGPESTSVFEKNSVWHISEDLDIQSMKKACSILVGHHDFSSFRAAGCQANSPVRTLDELSVTEVFPFMFFPSSVERSELELSNVSLVYSRKPDMESSGKGSDGSCTSSVKSDFENGKDFGKRSRHRCFVVTARARSFLYHQVRLMVGLLKSVGTGDLTTADVERILDAKTVTAAPSMAPSCGLYLANVKYDLNT

SEQ ID NO: 228357 - protein, 229 aa, Zea Mays
MTDRNPAAASSKRHCDLSLDDPTPSAKLQRCSEPSEPTPAGKPNGGAATGEESEMMAGARNPRAQRYLVAVEYIGTRFSGSQKQPNQRTVTGVLEDAGVHALSNVCHVDVERISKRKPGEVLTPHEPGVVKRAVNHFLLKSEGDIMVTDVCCVAPDFHARYKSLERTYHYRLLAGPESTSVFEKNSVWHISEDLDIQSMKKACSILVGHHDFSSFRAAGCQPGGTGQNI

SEQ ID NO: 228358 - protein, 181 aa, Zea Mays
MAHEVGDNGGELPPPAKKKSPAEEEAEKRRKKLTPGSLMKGIIRSGSGDATPAEGDQVILHCTTRTMDGIIVNSTRREHGGKGIPLRFVLGKSKMILGFAEGFPTMLKGEIAMPKIHYAEVDCPVAAPDGFPKDDELQFEIEMLDFFKAKVVAEDLGVVKKIVEEGKGWETPREPYEITAR

SEQ ID NO: 228359 - protein, 121 aa, Zea Mays
MASVSLALLPATSAHRTRRASWRDHDRALERWEEADAVRSWLSAIVERNRALRRRRGSTSFCLPRGGLVGTAGSTKERRGRREEANVFCALGVGAKMEEPAVDPGITFFCLATRPSKRGMS

SEQ ID NO: 228360 - protein, 447 aa, Zea Mays
MGDEAKCSVDVAEGAYIMASIMAVSGIMVTVLVLSALFHFVLRRLGQPSVISHILAGIVVGPTVLGRAMDLRQLGMRDAGDALGGTIYFVRMVFMFFIGLELDLRYLRRNLRRSLVVACGGSGFCFVLAVLTGPFTYGFLHPGQGHFQPSNIYASTALFAIVITSTASPVLIRIVTELKLSGSETGQIAIGAAFANDMASLTALSVIVVTHTLYGTMPNEKESSPPAKVAVVAWMALTVWMAVNLAAWVARMLNRLKRGRQYISKYELCGMLLLIVGLSLLEQIMGYSASMTAFLIGLAMPREGPTARTLMDRLAYPVHQLFMPLCFAAIGARLDFAKIGKFTVVQLVVAVTFTTLLSTAGKVAGTLLAGRALGIATREAVVLGALLNVKGYSDILAINFGNKINVWGETMQGTSRRRVPVAPCRARDIAQVRHHAAAIPRPGWWRG

SEQ ID NO: 228361 - protein, 505 aa, Zea Mays
MPLCFAAIGARLDFAKIGKFTVVQLVVAVTFTTLLSTAGKVAGTLLAGRALGIATREAVVLGALLNVKGYSDILAINFGNKINVWGETMQVVLLVSSIINTFMAGPASAAIVRQQRRAYHYRSRCLEDLSLAHELRMLVCTHGATSVYSMLTLSHLSRGRAPVVAVYLLHLVELATSRKYAITQQLYHARDGGEDEDEWGYAREIEHVASAVATFTYDNAILVRQMTAISSLGSMDTDVRNCVEDARASLVIMPFHKEQRYDGRMVCRHEGRRQLNQRILHRPPCTVGILVERCFAHEVTGEHHQVVALFLGGADDREAVSFAIRLAVEPLVIVTVCRLLLPSGRGLVGNPEMMEENMEDEEFMADLCARFVAPGQVSYMEKYVSNGAETVNTLRSMVGTCSLFVVGKGDRAHGNRGVMTSDMGGWDEECEELGPIGELLSSDDLVGCGSVLVLQQHNKYKMKTWDKDNQQQCHHASVVDGDAVVDIIGSSSVTSSSTSHSRRPN

SEQ ID NO: 228362 - protein, 176 aa, Zea Mays
MVLSAGGLGLLISLTVEEPGLRGGSMTVSDDETVEIDDNEERRLCGLTGDYNEDDLREDAAALLGHSSEHPIHVGDEQQGGGEEGQGEGDEHNAKHCRPSTSPVWLDFEKLFKIVNVYLRLPQFSHAFPFTYELQSVAAQRARVASPQPIRNAAVVELVAAGARRDDDLHAVLVVL

SEQ ID NO: 228363 - protein, 133 aa, Zea Mays
MKCIQSFKWIASRMDEDLHYATDLFYDCENVRSLFGSVAPYVVSQVSSSSLKKAIGFKTEVSYCDALMVLKSWITSKVPFRASMSQMWKFYTLLSEGVADAKIDIKREFMSSPSIFTPLQRPRASGRDFVKTN

SEQ ID NO: 228364 - protein, 372 aa, Zea Mays
MERSRPGAAPTPSPEEEVAAEGHAHGDDVTGQEEEATPVVLKKGPWTASEDAMLMDHVRHHGEGNWNAVQRMTGLLRCGKSCRLRWTNHLRPNLKKGSFSPDEELLIAQLHAQLGNKWARMAAHLPGRTDNEIKNYWNTRTKRRQRAGLPVYPPEVQLHLALSKRCHYDDYDFPPLASSPQLSATTTTDVQALGAGPGYASSRPAPLDLARSQLAATTTQQTAQFLSPPPFSAPSSPWAKPFARNAQYFQLAHSSPVSPSTPTGPVHPAMPDLSLGGHGARAAAAADQSRLPPLSPSPGPRVELPSNQYGQPAPPTSAAAVAAGLALPDHQNAASLEQMLQELHDVIKVEPQALVPASGGGAALERHDCGGA

SEQ ID NO: 228365 - protein, 159 aa, Zea Mays
MDSLRGVKLPGVPKGGSALVKVALLGGAGLYAVLNSFYNVEGGHRAIVFNRLEGIKDKVYPEGTHLMIPWIERPIIYDVRARPNLVESTSGSRDLQMVRIGLRVLTRPMPDQLPKIYRNLGENFNERVLPSIIHETLKAVVAQYNASQLITQRGCEQGD

SEQ ID NO: 228366 - protein, 99 aa, Zea Mays
MPFCVDYRKLNEMTIKNIFPMPLVDEILDELAGAQFFISLDMTIGYHHIRMGVEYEYKTAFKTHHGHYQFRVMPFGLTNAPASFQCAMNSVLESFLRKL

SEQ ID NO: 228367 - protein, 173 aa, Zea Mays
MASEVEDEAATPLLANGAADVRRRRDQAKAILSTQAVRIATKAEQHERFIFKVTHLLGVLGFGGFCYLLGARPQDVPYVYCLFYVIFVPLRWIYYRYKKWHYYLLDFCYYANTFLLVMILFYPEDEKLFMVCFSFAEGPLAWALIVWRCSLVFSSFDKLVSVLIHLLPVYWHI

SEQ ID NO: 228368 - protein, 560 aa, Zea Mays
MQPPGPPLATPQPLPPAVAAELAQLESRLGQVAGEPARHELAELGEVAAVRVLRRIARSQEQVRTLTGYIVSAAVQETFALNAQAVPTAESRACNSSAPSLSDGSVQGPQCASELRMEEVTAGLSNYRMAICEGQGQEDHAVMMAIDNPPDCIPPWGWDQDCIEVDNLVPGIASQANQMPMQYGDRDRIQELVSIVPHGVRMLAESLENGRASELQNYVQNGIPEQWMVPADQRMESTSSRLQHVLKCLQGVGPFGHHLGPECAIMIPKPEPNVVVENLFREIASPHITDNKLRNTASPQMCALEDLEFSKRFLILSYLCRNNLEDEVVLTVDYIKSLKFLSMVHFESQIWRKFGQKNFQASNRAATDRAKNFDSDPTTTKLYHCNIEIRGESIFFVLKFTRIQEKRRKRKTVNRGISRNALRLFHLILSKTLTLDVDLSTIDVILIDDEPCRDEHGNIVMLDGKRLIHTDGTGFISENLAKKCPSRIIKGKKSKVYMHQGETTVRLFYNGYAVKGTLLVDKRIYLSINRDPYIIEIDLSVNGDPSHIGMLYRDSNTPSV

SEQ ID NO: 228369 - protein, 657 aa, Zea Mays
MTTSAADDGSSLAPTITEGETTADAGAGAGVECVEGKEMKVGAAAPVEEPDKEAAREEDPGDDDDYEEEEEEEEEEEEEEEEEEEEVEEETETANGKEAELMEPLAALKPGEEVKPEKLEGEKEELDEEPEASEEDPEEVEELKEEGDGIAEEGLVDGSEANDDKDADQLSSGSDSGGSRSRGMQNSELAGGLEIFVDDLPQDCVKEDIAMAFSQSGEVKSVRIIKNSSTGKNQDIAFVCYTSIEAAKKVLAEFKEGIEVKGKMVRVSACQDNNTLYLGNICKGWTRDQVLNTLKSIGIQECEISFPSYKGGSRGFAFLKFTSHYYARAALRRLMKSDAIFGTDRSAKVSFYRTPTKSSKRLIQAKIVYLEHVPLSWDENKVKEYCEEYGEILKADVFQISKNMENETISFVEFSSRKGALACVTGINKANIVDGSFKLCAYLAWPKSASKVNSAAPSNAATATEKDKTHTEKILVDIDLQHKFQKGDKSKLTSQTKEAIMKKKKSSKLPNDNDTKLTSQGAAEVPQTSKSSEGKRKVGKNKHASVYQKPLKKAINNRNVDESQLTHRSAAVLQTSNTSKGKRKASENRSLYLNEKALKKARGNSNLGGSSRSKSYASDLEPHAGFISPAIRDNGSDAYNRQSATISLLWLQKPCWL

SEQ ID NO: 228370 - protein, 772 aa, Zea Mays
MTTSAADDGSSLAPTITEGETTADAGAGAGVECVEGKEMKVGAAAPVEEPDKEAAREEDPGDDDDYEEEEEEEEEEEEEEEEEEEEVEEETETANGKEAELMEPLAALKPGEEVKPEKLEGEKEELDEEPEASEEDPEEVEELKEEGDGIAEEGLVDGSEANDDKDADQLSSGSDSGGSRSRGMQNSELAGGLEIFVDDLPQDCVKEDIAMAFSQSGEVKSVRIIKNSSTGKNQDIAFVCYTSIEAAKKVLAEFKEGIEVKGKMVRVSACQDNNTLYLGNICKGWTRDQVLNTLKSIGIQECEISFPSYKGGSRGFAFLKFTSHYYARAALRRLMKSDAIFGTDRSAKVSFYRTPTKSSKRLIQSGPRPCHLDEKIHPGRVRSPSRSHGIILIEGHDKLTMVSTEQPPNPVLPSSMGRFKLSTLQMPIQGGAQPSRNPRVDEKHEEMSMIYAQAKIVYLEHVPLSWDENKVKEYCEEYGEILKADVFQISKNMENETISFVEFSSRKGALACVTGINKANIVDGSFKLCAYLAWPKSASKVNSAAPSNAATATEKDKTHTEKILVDIDLQHKFQKGDKSKLTSQTKEAIMKKKKSSKLPNDNDTKLTSQGAAEVPQTSKSSEGKRKVGKNKHASVYQKPLKKAINNRNVDESQLTHRSAAVLQTSNTSKGKRKASNLGGSSRSKSYASDLEPHAGFISPAIRDNGSDAYNRQRTARYDIHPIDVHPYARAPPSAYSGYKSHAGYEAANTYEYAGNRAPTPPSGSYIPRRGHY

SEQ ID NO: 228371 - protein, 683 aa, Zea Mays
MTTSAADDGSSLAPTITEGETTADAGAGAGVECVEGKEMKVGAAAPVEEPDKEAAREEDPGDDDDYEEEEEEEEEEEEEEEEEEEEVEEETETANGKEAELMEPLAALKPGEEVKPEKLEGEKEELDEEPEASEEDPEEVEELKEEGDGIAEEGLVDGSEANDDKDADQLSSGSDSGGSRSRGMQNSELAGGLEIFVDDLPQDCVKEDIAMAFSQSGEVKSVRIIKNSSTGKNQDIAFVCYTSIEAAKKVLAEFKEGIEVKGKMVRVSACQDNNTLYLGNICKGWTRDQVLNTLKSIGIQECEISFPSYKGGSRGFAFLKFTSHYYARAALRRLMKSDAIFGTDRSAKVSFYRTPTKSSKRLIQAKIVYLEHVPLSWDENKVKEYCEEYGEILKADVFQISKNMENETISFVEFSSRKGALACVTGINKANIVDGSFKLCAYLAWPKSASKVNSAAPSNAATATEKDKTHTEKILVDIDLQHKFQKGDKSKLTSQTKEAIMKKKKSSKLPNDNDTKLTSQGAAEVPQTSKSSEGKRKVGKNKHASVYQKPLKKAINNRNVDESQLTHRSAAVLQTSNTSKGKRKASNLGGSSRSKSYASDLEPHAGFISPAIRDNGSDAYNRQRTARYDIHPIDVHPYARAPPSAYSGYKSHAGYEAANTYEYAGNRAPTPPSGSYIPRRGHY

SEQ ID NO: 228372 - protein, 702 aa, Zea Mays
MTTSAADDGSSLAPTITEGETTADAGAGAGVECVEGKEMKVGAAAPVEEPDKEAAREEDPGDDDDYEEEEEEEEEEEEEEEEEEEEVEEETETANGKEAELMEPLAALKPGEEVKPEKLEGEKEELDEEPEASEEDPEEVEELKEEGDGIAEEGLVDGSEANDDKDADQLSSGSDSGGSRSRGMQNSELAGGLEIFVDDLPQDCVKEDIAMAFSQSGEVKSVRIIKNSSTGKNQDIAFVCYTSIEAAKKVLAEFKEGIEVKGKMVRVSACQDNNTLYLGNICKGWTRDQVLNTLKSIGIQECEISFPSYKGGSRGFAFLKFTSHYYARAALRRLMKSDAIFGTDRSAKVSFYRTPTKSSKRLIQAKIVYLEHVPLSWDENKVKEYCEEYGEILKADVFQISKNMENETISFVEFSSRKGALACVTGINKANIVDGSFKLCAYLAWPKSASKVNSAAPSNAATATEKDKTHTEKILVDIDLQHKFQKGDKSKLTSQTKEAIMKKKKSSKLPNDNDTKLTSQGAAEVPQTSKSSEGKRKVGKNKHASVYQKPLKKAINNRNVDESQLTHRSAAVLQTSNTSKGKRKASENRSLYLNEKALKKARGNSNLGGSSRSKSYASDLEPHAGFISPAIRDNGSDAYNRQRTARYDIHPIDVHPYARAPPSAYSGYKSHAGYEAANTYEYAGNRAPTPPSGSYIPRRGHY

SEQ ID NO: 228373 - protein, 126 aa, Zea Mays
MVGSVGNGLADLDAGAISMNGVGKALYPAKAAAAAAAETLPVELEPPEAVVAPTGEEAANGKREIVMGRNVHTSCFAVKEPDADDEETGEREATMASILALYRRSLVERTKHHLEVLRELSLPSPS

SEQ ID NO: 228374 - protein, 286 aa, Zea Mays
MVGSVGNGLADLDAGAISMNGVGKALYPAKAAAAAAAETLPVELEPPEAVVAPTGEEAANGKREIVMGRNVHTSCFAVKEPDADDEETGEREATMASILALYRRSLVERTKHHLGYPYNLDFDYGALAQLQHFSINNLGDPFIESNYGVHSRQFEVGVLDWFASLWELEKDEYWGYITNCGTEGNLHGILVGREVFPKGILYASRESHYSVFKAARMYRMDCVKVDTLMSGEIDCADFQRKLLQNRDKPAIINVNIGTTVKGAVDDLDLVIKTLEENGFKGASSDI

SEQ ID NO: 228375 - protein, 191 aa, Zea Mays
MGRSVLVHGPPHAGATEVLPCSRWWLQLRHSSPRRHTPKVLHLLQGVDPLGDAAASDSVCDRRRFRHVQRVLPVQDVCLRQRHSTGPSAGRRGAVLGTGGRGGEGVVRGAFFLEAGARPGDAVLPVCAAEAEAFRAAVGTGARQACVHLLFQAEAVVELCGDALHRECCMYSPFEFYSDMAWFGGAGAWVG

SEQ ID NO: 228376 - protein, 254 aa, Zea Mays
MAWGGLFLCMGRPTQEQQKSCLAAAGGFNYDTALQGATRPKSVSTLTSDEAGGEIGDKDLTERGFFVNRSRVLVGSGTGGFQALGFRVGERGTGHPGEGRYKVLHLLQGVDPLGDAAASDSVCDRRRFRHVQRVLPVQDVCLRQRHSTGPSAGRRGAVLGTGGRGGEGVVRGAFFLEAGARPGDAVLPVCAAEAEAFRAAVGTGARQACVHLLFQAEAVVELCGDALHRECCMYSPFEFYSDMAWFGGAGAWVG

SEQ ID NO: 228377 - protein, 173 aa, Zea Mays
MALGFRVGERGTGHPGEGRYKVLHLLQGVDPLGDAAASDSVCDRRRFRHVQRVLPVQDVCLRQRHSTGPSAGRRGAVLGTGGRGGEGVVRGAFFLEAGARPGDAVLPVCAAEAEAFRAAVGTGARQACVHLLFQAEAVVELCGDALHRECCMYSPFEFYSDMAWFGGAGAWVG

SEQ ID NO: 228378 - protein, 503 aa, Zea Mays
MGYEESKKHLLSLSYPELQCLCKRYNLPAKKTHSQLASSLASLLEASPSPAPPPVQLANMKEASTCNHANNKRGPYNGRDDGKPLVHAKHQKGDQTPVDETSKKGIDTGTSIPPVSMNHGRPEYHGHLSSDLRTAHNLQSQCDVGIATNTTNLEFVGKHDCSPANVIDQICPPIIQKYPSNGNGQASTKFGRMNDNTEKGCRLSDKISANAAAVQFSVMSDEGIDLLVDLNSSSATWAKNFMAEMHITPPSEHGNFSSFISSLSTKDDHSTASPSGNIIVDIQNKGAENIVPSTDSSLASDVGESSRSVLYPVDTTTVNSVSSTSTVAGTPVELSGYQEGAPVVCSSCLTADVQNNVTSDMPGASDNEVLPPEPADVFLQSERITAPAVCGSVQPIGNKCTMSSGDEVRSGSNEDSCPKSSGKQTGDETLMENEPVKAVAVEENIGRDDSLSISYQLACKTVAELPVTDAQSPASSSGHFIAGNFDNTHPTSSATSFLLTAIK

SEQ ID NO: 228379 - protein, 498 aa, Zea Mays
MGYEESKKHLLSLSYPELQCLCKRYNLPAKKTHSQLASSLASLLEASPSPAPPPVQLANMKEASTCNHANNKRGPYNGRDDGKPLVHAKHQKGDQTPVDETSKKGIDTGTSIPPVSMNHGRPEYHGHLSSDLRTAHNLQSQCDVGIATNTTNLEFVGKHDCSPANVIDQICPPIIQKYPSNGNGQASTKFGRMNDNTEKGCRLSDKISANAAAVQFSVMSDEGIDLLVDLNSSSATWAKNFMAEMHITPPSEHGNFSSFISSLSTKDDHSTASPSGNIIVDIQNKGAENIVPSTDSSLASDVGESSRSVLYPVDTTTVNSVSSTSTVAGTPVELSGYQEGAPVVCSSCLTADVQNNVTSDMPGASDNEVLPPEPADVFLQSERITAPAVCGSVQPIGNKCTMSSGDEVRSGSNEDSCPKSSGKQTGDETLMENEPVKAVAVEENIGRDDSLSISYQLACKTVAELPVTDAQSPASSSGHFIAGNFDNTHPTSSATSVS

SEQ ID NO: 228380 - protein, 202 aa, Zea Mays
MDRRIHGSLVSLPLVLPGSPLHDTRPQPLLRCGEVPPPRPDAPKMWSKSTSMMHADSGLVGTSRWSTTFFLKMVWSYTNLWGEISALASFREVDLDSAAQKKWRLQLSTSAASPSHGGCEASAEAVAPDEPCGTFYCALLLLLPSRCIPVRFACANGRATSTGVLPCVPHPGHSMLLTMALRCDSAEWQDARLAELPSHYNA

SEQ ID NO: 228381 - protein, 68 aa, Zea Mays
MDLKKLLDNDQHPLHRCEAKWWTIPRPVDNCRWEGRHGSLALLPQQRPPAPFLARREMDRRIHGSLDA

SEQ ID NO: 228382 - protein, 682 aa, Zea Mays
MTANFVVVTQTLDWKLHAFDVLSEFDANNEASGSPMLQFEWLVGTQYKPMELSKSDWASIRKSPPWAIDSWGLGCLIYELFSGAKLARTEDLRNTASIPKSLLPDYQRLLNSTPSRRLNPSKLIDNSEFFQNKLVETIQFMEILNLKDTFEKDSFFRKLPNIAEQLPREIVLKKLLPVLASSLEFGSAAAPALTVLLKMGSWLPADQFNIKVLPTIVKLFASNDRAIRACLLHHINQFGESMSAQIVDEQVFPHVATGFSDTDGTIRELTLKSMLVLAPKLSQRTISGSLLKYLSKLQVDEEPGIRTNTTILLGNIAGYMNDGTRKRVLINAFTVRALRDTFPPARAAGIMALSVTSSYYEMTEIATRILPNIVVLTFDPNSDVRTKAFQATDQFLQIAKQHHEKIQGFWYFSWFRSQLNTGDNSVAESTGVKLKPGNAGLLGWAMSSVTQKGKPFDHAPISTANANNSQASTTSTATPDTQASTLAYAPSTSTSLDQAASASARSSVDGWGELEDGNIHEENSSDKDGWDDVDPFEDKPSPSLLSNIQAAQKRPVVQPKQPVANSSKPNPLKAPKSEDDPLWGPIAAAPPKSAVKSADIKPSTSHNDEDDLWGSIAAPPKSSGKPLKPAVANSDDLWGAIAAPPPATKARPLASSGRGRGTKPAQPKLGAQRIGRTSSTGM

SEQ ID NO: 228383 - protein, 451 aa, Zea Mays
METPPRYLQGSNPQDRHMVAGRNGVKRLRTVRHPNILSFLHSTEAEAADGPAMKYTIYIVTEPVMPLSEKLKELNLGGTQRDEYFAWGLHQISKAVSFLNNDCKLVHGNVCLASVVVTQTLDWKLHAFDVLSEFDANNEASGSPMLQFEWLVGTQYKPMELSKSDWASIRKSPPWAIDSWGLGCLIYELFSGAKLARTEDLRNTASIPKSLLPDYQRLLNSTPSRRLNPSKLIDNSEFFQNKLVETIQFMEILNLKDTFEKDSFFRKLPNIAEQLPREIVLKKLLPVLASSLEFGSAAAPALTVLLKMGSWLPADQFNIKVLPTIVKLFASNDRAIRACLLHHINQFGESMSAQIVDEQVFPHVATGFSDTDGTIRELTLKSMLVLAPKMQERAHTHNNLPWHALMEYFWDFRSSIPHALISISCQKLYLQMTDCLVRYCSYLSVQSQDLS

SEQ ID NO: 228384 - protein, 761 aa, Zea Mays
MRHPNILSFLHSTEAEAADGPAMKYTIYIVTEPVMPLSEKLKELNLGGTQRDEYFAWGLHQISKAVSFLNNDCKLVHGNVCLASVVVTQTLDWKLHAFDVLSEFDANNEASGSPMLQFEWLVGTQYKPMELSKSDWASIRKSPPWAIDSWGLGCLIYELFSGAKLARTEDLRNTASIPKSLLPDYQRLLNSTPSRRLNPSKLIDNSEFFQNKLVETIQFMEILNLKDTFEKDSFFRKLPNIAEQLPREIVLKKLLPVLASSLEFGSAAAPALTVLLKMGSWLPADQFNIKVLPTIVKLFASNDRAIRACLLHHINQFGESMSAQIVDEQVFPHVATGFSDTDGTIRELTLKSMLVLAPKLSQRTISGSLLKYLSKLQVDEEPGIRTNTTILLGNIAGYMNDGTRKRVLINAFTVRALRDTFPPARAAGIMALSVTSSYYEMTEIATRILPNIVVLTFDPNSDVRTKAFQATDQFLQIAKQHHEKIQGFWYFSWFRSQLNTGDNSVAESTGVKLKPGNAGLLGWAMSSVTQKGKPFDHAPISTANANNSQASTTSTATPDTQASTLAYAPSTSTSLDQAASASARSSVDGWGELEDGNIHEENSSDKDGWDDVDPFEDKPSPSLLSNIQAAQKRPVVQPKQPVANSSKPNPLKAPKSEDDPLWGPIAAAPPKSAVKSADIKPSTSHNDEDDLWGSIAAPPKSSGKPLKPAVANSDDLWGAIAAPPPATKARPLASSGRGRGTKPAQPKLGAQRIGRTSSTGM

SEQ ID NO: 228385 - protein, 417 aa, Zea Mays
MFKFLKEVVAGSGSGLKDFPYTIGEPYASAWGSWKHHRGTSKDDGSPVSIFSLSGSNPQDRHMVAGRNGVKRLRTVRHPNILSFLHSTEAEAADGPAMKYTIYIVTEPVMPLSEKLKELNLGGTQRDEYFAWGLHQISKAVSFLNNDCKLVHGNVCLASVVVTQTLDWKLHAFDVLSEFDANNEASGSPMLQFEWLVGTQYKPMELSKSDWASIRKSPPWAIDSWGLGCLIYELFSGAKLARTEDLRNTASIPKSLLPDYQRLLNSTPSRRLNPSKLIDNSEFFQNKLVETIQFMEILNLKDTFEKDSFFRKLPNIAEQLPREIVLKKLLPVLASSLEFGSAAAPALTVLLKMGSWLPADQFNIKVLPTIVKLFASNDRAIRACLLHHINQFGESMSAQIVDEQPLASLILMVLFVN

SEQ ID NO: 228386 - protein, 240 aa, Zea Mays
MVPARAWISRRKTRGGKVGRVSFLGFLLAKGNKAAGRAPLNWETRVKISLDVAHGIAHLHTEGGGKFIHGNIKASNVLLSQNLDGCVSEFGLAQIMTTPQTPPRPVGYRAPEVLENKKSTQQSDVYSFGVLLLEMLTGKAPLRSPGREDPSVEHLPRWVQSVVREEWTAEVFDVDLLRHPNVEDEMVQMLQVAMACVAAHPEERPKMEEVIRRVTEVRNSYSSGTRTPLEDKPSETARAP

SEQ ID NO: 228387 - protein, 210 aa, Zea Mays
MQALMATDKCFSPARAMSPMPIVRPPASPDIAIQYLDDLLQEQQKLGPFVQVLPICGMLLNQEIRRISNLLSNFGLRGNERSPPIASPNHMHPLPRVPNFCGNSFGPWNEMHPERNGLPRGAMGWQGAVQNHSSYIVKKIVRLEVPTDAYPNFNFIGRLLGPRGHSLKRVEATTGCRVFIRGKGSVKDPVKRNSSREGLAMNTWAIQHIS

SEQ ID NO: 228388 - protein, 344 aa, Zea Mays
MNIRHHNIVLFVGYCAETQEVVVRQEGKHIFAEKRERLLCFEYLHNGSLHKHLTAEPCGLPWHICYQIIKGICLGLHYLHDKNIIHLDLKPDNILLDDDMVPKITDFGLSRLLGNGKSHTITQTRIGTWGYMAPEYLDDGVITMKTDIYSLGVIIRHMVKGRNSADTTDEEVLANWLIRLEKDPSQMMRQQTTRLLFETEYKEQIKACMDISWRCTLRKPMDRPTTQHILLTLEETEAKIKSVVGPTPPNAGQLQIAKFGPWGGDGGKTRDIRMTPCHLHSVTISSGTIIDSIGFSFTDHYGQHHTTGPWGGKEGTNKLGGLHPNTFQHSMHIQIRVASMMVCD

SEQ ID NO: 228389 - protein, 783 aa, Zea Mays
MNIRHHNIVLFVGYCAETQEVVVRQEGKHIFAEKRERLLCFEYLHNGSLHKHLTAEPCGLPWHICYQIIKGICLGLHYLHDKNIIHLDLKPDNILLDDDMVPKITDFGLSRLLGNGKSHTITQTRIGTWGYMAPEYLDDGVITMKTDIYSLGVIIRHMVKGRNSADTTDEEVLANWLIRLEKDPSQMMRQQTTRLLFETEYKEQIKACMDISWRCTLRKPMDRPTTQHILLTLEETEAKIKSVVGPTPPNAGQLQIAKFGPWGGDGGKTRDIRMTPCHLHSVTISSGTIIDSIGFSFTDHYGQHHTTGPWGGKEGTNKLGGLHPNTFQHSMHIQIRVASMMIELGPSEFLTGVSGTSGPFKNLTNVVTSLTFVTNTRSYGPFGKGRGTPFHIQTQNNGRIVGFFGRSGQYLYAIGVYTNQDARVARIGRPLGGDEGVLHGITDLSGQQRSRGGGPSGECGDSDDEPNGDFAKFGPWGGDGGQPQDIGTLPCRLDRIKISSGLIIDSIEFSYAGPDSQYRTAGPWGGHGGDNSSFQLAGSEFLTGVSGSIGTFNGHANVITSLTFVTNARSYGPFGRGRGTSFHIPVQGNGCIVGFFGRSGRYLNAIGVYTAPKPEPKAVGKQDGGDEAVVARIGPWGGVGNALHDIAERPHRLHRVTIFSGTIVNSLEYLYSDGDGQQHTTGPWGGCGGTGRKIHLAPEEFIVEVTGTFHPCAWDRTIPSVVSSLTLVTSTGKTHGPFGTQLGAAFQVPVQSDSRIVGFFAHGDNYIEAIGAYVKKLTESSNR

SEQ ID NO: 228390 - protein, 170 aa, Zea Mays
MVSSLPLSSLLLLLLLLSAASFGGGVRLGDGGYEDWRLGTATYVKEFQSHPLNDGGGACGYGDLDIFRYGRYTAGLSAALFGRGGACGGCYELRCVNHIQWCLRGSPTVVVTATDFCPANMGLADDDAGGWCNFPREHLELSEAAFLRVAKAKAGIVPVQFRSWHMDMVV

SEQ ID NO: 228391 - protein, 546 aa, Zea Mays
MDYVVARMQLQQAAVPPPVHSIADHRPPPVSQRTRGSATMQRQRREALEQEVAELKQQLSNEQTVHQILERALQPSSSMALANIPAFIPTKAKELLAELLLVEEEIARLEDQIKRMKKSAATQQQQQQQTEHCKSMFFISQAMDGEAYLSTVVNNKRHSLASSSDGHAVLEKKIAQHELPITKKSPTVIAKRRARDQQQPPNKLSERILKCLVCIFMRLLRSSRASESAAGNLGGFRMDMGLVNVAAAAAAKEKERGQQDHYGIFGIQDSMVRDIGPYKNLVRFTTSAGSGSGSGSGSLDLHLLSRGFSASPLVSKLREMLEALQQVDVRSLNHHQRLAFWLNIYNTCIMHGILQHGLPSNSDKLLALKNKATINVSGQTFNALVIENFILRQPSSVKQQELWQCDVDVEEEQAVREVYGLKTSEPNILFALCCGIRSSPALRIYKADRVLVDLDKAKLEYLQASLVVTSTRRLMIPSLLHSNMHDFAKDTESLLRWICEQLPTSWSIRKSMVDCLAAITNNNNKLEEVVVDVIPLDYDFQYLLPM

SEQ ID NO: 228392 - protein, 58 aa, Zea Mays
MTSGPVRVQRMQHRQEDSLRSMTQGTMLCLPISCLLYHLGIMPLLLYHLGLKGRLKNF

SEQ ID NO: 228393 - protein, 103 aa, Zea Mays
MAMGNSQREQMWTRSPSGRRERRPMARVAAAAEVVTAPRLFATGRSAITRWSGHATVTDSRMLPPSAAAAPTAAGAPAPAAVLAAAPPESDEPILLRRICSIA

SEQ ID NO: 228394 - protein, 959 aa, Zea Mays
MDSLEIKRKEDYQMEPIEIKDDEEHPIEMLVDQPRFLEPLCPEEVNEDTRVYPRVGDEYQVKVPDLLTVEEQMKLRSSTVYGSMAFGFEYPVGVGLAIPVTWTQNRSSHIKEERMGFPGHSSFPSQGEGSNHKSGNVLDILYQHGVCSECVNCKVESAEQGEKLPGFVGQDMHCLQKRKLLGCSCVNRKLTDSFPLPGMTRYSWTDEEAQIFLLGLYSFGKNLVQVTRFTETKTMGEVLSYYYGEFFRSDAYRRWAVCRKARSRRCIFGLRIFSGPRQQELLSRLLAGVAREVEAPLLEVFKILNEGTSTFEQFILTLRSTVGAQVLVQAIGIGKGKYDLTGFALDPSRNHGISARPEIPVGKACSALSSGDIIKFLTGDFRMSKARSNDLFWEAVWPRLLSRGWHSEQPKDSSPIGKHALVFLIPGVKKFSRKKLVKGNHYFDSVSDVLSKIASEPRLLEFGVERGNDESVIKHENGWSHDSEPDRNILPNKKPSCYNRPTEPGCSPELMKFTVVDTSLVQGEEPSKVRSLRNLPTDSSHGYMSSPHCGGSGSDSSEEHSDSEDSSRSCEHIITDDRSTTNAKYASDERKSKPPTADKVDSSVIQKSASSGTLVSINGHISTDQGFSTMNNVSSSNATILPVDVQMVHAPTTSTEISFQFDQRLNAESQIFLAPFSKRRRLVSSKTERTGRKNTTTIENHYWKQVDEPVHHDASGENEASGPKAFVWGATPSSSTNISFEVNNKKPYCRQLDNVLPNAETMVYKETCQNRHVIDLNIPQMPSDFESTVSYIVPPSDKNAETTIRPIRTSGAEEVTDRVPDIEASSDVLYDEFSFNSRRHSSRSRPPTARALEALACGFLGTKQKGRETSFPSSSRSSRPVRRPRRSPDVARPFPSEGKECTSRFPDPPMDVNAWQMNNSPYQMIHSSSSDKSTEKGSPDLFGADKSTDKGVHELYGIP

SEQ ID NO: 228395 - protein, 125 aa, Zea Mays
MCHGTSGAFRKTVDGKWVHAFCAEWLLDTKYVRGQDKPVEGTEALVEGKDTCCVCLHNVGVCLRCSSGDCNITFHPTCARSCGFYMNTKGFGTTPQHKAYCGKHSVQQKEADAQQYGPEEHTSMK

SEQ ID NO: 228396 - protein, 176 aa, Zea Mays
MSNRAVGHWASKFSVWQGGSEPGEEWVAVRRTRAPSENGAVGLGARGFSALACDSVPRPRGMGAGGGEQEWQSWRDERAEAHPKSALISTSITHTASQGCRGPKSASAGAGKGANGQSVVQRLQSELLALLMGDDPGVSAFPGATTCSTSSQVRYVVHCARSWVSSGSRVHRLDVL

SEQ ID NO: 228397 - protein, 225 aa, Zea Mays
MRARTNENTSLLQELPGQLAVRVRRVRGQRLQRHAVRQLQRGPGQHVHAADRERHRGRRGEAAGHGRHGRGGAGGAPHRLLPHLPHRLRHLQQRRLRRARLPQEVQRPLHQPQRPVAGPDLRPPGQVQVGAHHVRRLLLRRLRHGQEPRQLRVQLGVPGVLRLGGRQVQLPEQRAVRHVGRVRVLQPGVAPQLGRHPPHRGRLQADHRRLAQRALLPPRHPPQLS

SEQ ID NO: 228398 - protein, 365 aa, Zea Mays
MTTRVLKKSRAVSTLDIWPWKYLVPWMREDLFSRRDARGIDKVHSSKKVNAYDVEDMVMPLHQYINDPVAHEIIHNGATFQITGLTNNSYFDGAHEVRHCARKHPDLGRIVLEVAKNRLDQMLYVGLTEDHEESARLFAHMVGAQVLLQSGTLSLDLKEDLHSETGFDLFGDGVCALPDQNEYSHPSMVEPGDEEASEHLNNTHGWQNNEALNSTSDEQGKGNMTVGKLMEAYETCIAKLRKSQSSRRKISLKKVEEANFSKEARKLVPEAILKQIISLNSLDMELYDHAKKIFTQEHLMLKAQQSMAGQHRQLAEQEEGWIGTMCSDGTCSPWVVVLLGLGITTILVLATLAVTTRKRTSKLKV

SEQ ID NO: 228399 - protein, 426 aa, Zea Mays
MVQGEESSWRMERAALPLNQALAYGVQAHGAGGAAAAPPTCFLDFHQPAAAAAAYFGFGELEEALIHGGGGGVDPGVITKNDVAQAKSAAAAAGYLAGAAARPPTLEIFPSLPMRHQQQLHSRKHGSTGKDGKLVDAKTERRLAQNREAARKSRLRKKAYVQQLETTRIRLQHVEHEFQRARSHSQGVGVGGCGAAGDMSCGAAMFDMEYARWLDDDSKRLAELRGGLQAHLLLDANLGLIVEECMQHHDELFQLKAALARSDVFHLLTGSWTTPAERCFFWMGGFRPSELLKVLIPQLDPLTEQQLLGICSLQQSSEQAEEALAQGLHQLHQALADTVAAGTLNEGSAAPNCMNIMAVALDKIASLENFYQQADNLRQQTLHQMRRILTTRQAARCFLSIGEYYSRLRALSNLWASRPGEYVSQA

SEQ ID NO: 228400 - protein, 207 aa, Zea Mays
MCGNINWAKRTKCNICNTSKPGTNEGGVRGGRGGGYKELDEEELEEVKKRRKEAEEDDGEIYDEFGNLKKKFRSKALHTEGAQALPGSGRAGWEVEHRGPSEREGRERSRDRVRDDYYEKETRGRDRGDLGRDQRRSRSRSRDRERERRERRREHDYERRERDRDRDRRHSFELVDVMELTLSHYMASGGRSSSSSNSRASCGLAWS

SEQ ID NO: 228401 - protein, 261 aa, Zea Mays
MDATTPKYSKARYDEIVKEVSSYLKKGPTLLEALDQITEPKRPSDKPLRLPLQDVYKIGGIGTVPVGRVETGVIKPGMVVTFGPTGLTTEVKSVEMHHEALQEALPGDNVGFNVKNVAVKDLKRGYVASNSKDDPAKEAASFTSQVIIMNHPGQIGNGYAPVLDCHTSHIAVKFAELITKIDRRSGKELEKEPKFLKNGDAGMVKMIPTKPMVVETFSQYPPLGRFAVRDMRQTVAVGVIKSVEKKDPTGAKVTKAAIKKK

SEQ ID NO: 228402 - protein, 415 aa, Zea Mays
MGKEKSHINIVVIGHVDSGKSTTTGHLIYKLGGIDKRVIERFEKEAAEMNKRSFKYAWVLDKLKAERERGITIDIALWKFETTKYYCTVIDAPGHRDFIKNMITGTSQADCAVLIIDSTTGGFEAGISKDGQTREHALLAFTLGVKQMICCCNKMDATTPKYSKARYDEIVKEVSSYLKKGPTLLEALDQITEPKRPSDKPLRLPLQDVYKIGGIGTVPVGRVETGVIKPGMVVTFGPTGLTTEVKSVEMHHEALQEALPGDNVGFNVKNVAVKDLKRGYVASNSKDDPAKEAASFTSQVIIMNHPGQIGNGYAPVLDCHTSHIAVKFAELITKIDRRSGKELEKEPKFLKNGDAGMVKMIPTKPMVVETFSQYPPLGRFAVRDMRQTVAVGVIKSVEKKDPTGAKVTKAAIKKK

SEQ ID NO: 228403 - protein, 475 aa, Zea Mays
MPPHSSQEKLTLFPTTSPCKSVPAKYSSTDKRRLEGMDASDVKSKGPSGIKEKEPVQVRIDLEDKETTPSFQVLNDKTWSPDPKLSSHMDRLKKQHAEAESYQIRTRNENAVETQSPPKNGVSLLSKPYVDRREQNGDSDLLGHGLRETGVKRKRSHHDVEQNDDLSDSSVESLPGMEISPDDVVSAIGPKHFWKARRAIVNQQRVFAVQVFELHRLIKVQKLIAASPHVLIEGDPCLGKSLAVSKKRLAGDVETQLESAKNDDGVRPTQLEHSKEKTEANQPSPSQDEQAATNGDVAASMHTPSDNKQKSWCIPAPPSQWLIPVMSPSEGLVYKPYTGHCPPVGSLLAPPFFASYPTSSSSTAGGDFMSSACGARLMSAPVYFPSFSMPAVSGSAVEQVSHVAASQHKRNSCSEAVLASRDSEVQGSSASSPASSETAAQPRVIRVVPHTARTASESAARIFRSIQMERKQNDP

SEQ ID NO: 228404 - protein, 966 aa, Zea Mays
MDSLEIKRKEDYQMEPIEIKDDEEHPIEMLVDQPRFLEPLCPEEVNEDTRVYPRVGDEYQVKVPDLLTVEEQMKLRSSTVYGSMAFGFEYPVGVGLAIPVTWTQNRSSHIKEERMGFPGHSSFPSQGEGSNHKSGNVLDILYQHGVCSECVNCKVESAEQGEKLPGFVGQDMHCLQKRKLLGCSCVNRKLTDSFPLPGMTRYSWTDEEAQIFLLGLYSFGKNLVQVTRFTETKTMGEVLSYYYGEFFRSDAYRRWAVCRKARSRRCIFGLRIFSGPRQQELLSRLLAGVAREVEAPLLENVFTFSSKKLLNFYLAAHCINFILTLRSTVGAQVLVQAIGIGKGKYDLTGFALDPSRNHGISARPEIPVGKACSALSSGDIIKFLTGDFRMSKARSNDLFWEAVWPRLLSRGWHSEQPKDSSPIGKHALVFLIPGVKKFSRKKLVKGNHYFDSVSDVLSKIASEPRLLEFGVERGNDESVIKHENGWSHDSEPDRNILPNKKPSCYNRPTEPGCSPELMKFTVVDTSLVQGEEPSKVRSLRNLPTDSSHGYMSSPHCGGSGSDSSEEHSDSEDSSRSCEHIITDDRSTTNAKYASDERKSKPPTADKVDSSVIQKSASSGTLVSINGHISTDQGFSTMNNVSSSNATILPVDVQMVHAPTTSTEISFQFDQRLNAESQIFLAPFSKRRRLVSSKTERTGRKNTTTIENHYWKQVDEPVHHDASGENEASGPKAFVWGATPSSSTNISFEVNNKKPYCRQLDNVLPNAETMVYKETCQNRHVIDLNIPQMPSDFESTVSYIVPPSDKNAETTIRPIRTSGAEEVTDRVPDIEASSDVLYDEFSFNSRRHSSRSRPPTARALEALACGFLGTKQKGRETSFPSSSRSSRPVRRPRRSPDVARPFPSEGKECTSRFPDPPMDVNAWQMNNSPYQMIHSSSSDKSTEKGSPDLFGADKSTDKGVHELYGIP

SEQ ID NO: 228405 - protein, 473 aa, Zea Mays
MRMVEMLSHQLRVDQAILTGESCSVAKEVESTPAMNAVYQDKTNILFSGTVVVAGRARAIVIGIGSNTAMGSIRDAMLRTEDEATPLKKKLDEFGTFLAKVIAGICILVWVVNIGHFRDPSHGGFVRGAIHYFKVAVALAVAAIPEGLPAVVTTCLALGTKRMARLNAIVRSLPSVETLGCTTVICSDKTGTLTTNMMSVSKVCVVRSVHQRPMTDEYSISGTTFAPDGFIYDADGLQLEFPPQSPCLLHLAMCSALCNESTLQYNPDKKSYEKIGESTEVALRVLVEKVGLPGFDSMPSSLNMLTKHERASYCNHYWENQFRKISVLEFSRDRKMMSVLCSRKHQEIMFSKGAPESIMARCTHILCNDDGSSVPLTMDIRNELEARFQSFAGKDTLRCLALALKRMPAGQQSICYGDEANLTFIGLVGMLDPPREEVWDAIHSCMSAGIRVIVVTGDNKQNRCVGKLVLLST

SEQ ID NO: 228406 - protein, 575 aa, Zea Mays
MAIVGESGSGKSTVISMVERFYDPQAGEVLVDGVNIKSLQLQWLRGKISLVSQEPLLFMTSIKDNITYGKADATIEEIKRAAELANAATFIEKLPDAYETTVGQHGSQLSGGQKQRIAIARAILKNPKILLLDEATSALDVESERVVQEALNRIMVGRTTLIVAHRLSTIRSADCIAVVHQGKVVERGVHDKLIKDPDGAYSQLIRLQQAHATERHEVPDTDVSGSIYKSRSLPLEQSTGRDSPRNKGHHSFTKTTGLSKELNRQDFTDRQEDQEHGNSKAPKKAPIGRLFKLNKPEAPVLLLAAIVAFVHGLLFPSFSIMMSGGIRTFYYPPHQLRKDSRFWALTCLLFAVIALISIQLEYFLFGVAGGKLIQRVRSLSFQSIVHQEVAWFDEPSNSSGALGARLYIDALNIRRLVGDNLAILVQCIVTIAAGFSIAFASDWKLTLIVICVIPVMGSQNYIQVKFLKGFSEDAKVMYEDASQVVTEAIGSIQTVASFCAEKRVITSYIQKCQASMKHGIRSGMVGGLGFSLSNLIMYLTYALCFYVGALFVHEGKTTFKDVFRVRDTHLGSFKQ

SEQ ID NO: 228407 - protein, 483 aa, Zea Mays
MAIVGESGSGKSTVISMVERFYDPQAGEVLVDGVNIKSLQLQWLRGKISLVSQEPLLFMTSIKDNITYGKADATIEEIKRAAELANAATFIEKLPDAYETTVGQHGSQLSGGQKQRIAIARAILKNPKILLLDEATSALDVESERVVQEALNRIMVGRTTLIVAHRLSTIRSADCIAVVHQGKVVERGVHDKLIKDPDGAYSQLIRLQQAHATERHEVPDTDVSGSIYKSRSLPLEQSTGRDSPRNKGHHSFTKTTGLSKELNRQDFTDRQEDQEHGNSKAPKKAPIGRLFKLNKPEAPVLLLAAIVAFVHGLLFPSFSIMMSGGIRTFYYPPHQLRKDSRFWALTCLLFAVIALISIQLEYFLFGVAGGKLIQRVRSLSFQSIVHQEVAWFDEPSNSSGALGARLYIDALNIRRLVGDNLAILVQCIVTIAAGFSIAFASDWKLTLIVICVIPVMGSQNYIQVKFLKGFSEDAKVKILNFLQ

SEQ ID NO: 228408 - protein, 246 aa, Zea Mays
MSEHELGGLYADEMLSKEDVETMNNLHNDDEELPESPTAGNDDGEEASEADGADSVSGSGSDRVYTIDKVHQGAAMPIARVVDKYQGEAVEPDIKKLYMRLEALEADRESMRQALVAMRTEKAQLVLLREIAQQLAKDGVPVGPGAGAGPGVHHLPRKHAVGIVERRFTEDKKAILVKTFSMAALFKWILALLGKKKKLSQSRYTFGLTNNNVGLLILLDKCPRIQKTLTRTKLNLAERSSSSCTM

SEQ ID NO: 228409 - protein, 455 aa, Zea Mays
MCCSRFLQLEEVGSGGWSYPSDSTKDLVLLLRHSLRLQAVHQKDRRGEPAWLLPCRVAMEPERGLIAYEGPPPDSTDLLSSAWCSSAIQVLDTGGHKECSMALVEHPVMALGNDRNDVLAKSDRSLVVDNSSFSTAQWKYDDLKSWIWLQKAIHPELDYDLCLKKKWLPRKMTAWNGISLKKWVKERKQKRKEEARLQRAEVHAAVSVAGVAAALAAIAAENAAPRRAPGMRETALASAAALVAAQCARVAEAAGASRDQVAAAVDAARASTDDSSVITLTAAAATSLRGAATLRGRRSGSGGHGQNERAEHAGPALSQDDLDFDFNHARSRAALAKGDEMFVAMPDGKWKLHTVSAASNKRGEIVLRIKKTNLVMAFSHAKESVIHDVQPCSPEKPSPHEGATYPVEVSTNKGKVELRTDDYGVYKRWVATLSHMLVMSTAVSVSTRHEPARRD

SEQ ID NO: 228410 - protein, 83 aa, Zea Mays
MRYREKRKSRRFDKTIRYASRKAYAETRPRIKGRFAKRTPGAGADGEEPLEEHEEIYSSAAAAVAALMAPGGADADYGVVPTH

SEQ ID NO: 228411 - protein, 365 aa, Zea Mays
MASNADQHAAVVSAAPSDSPVGAKKAGAAAAVWKLPAAAAVPVAEVVENPIMDAHSWPALPGLSSPPPPPPPHAGPTAKASPKAASPAPTGAATSPVSLGNPGAPDASHGNDARVRNPVARRALVMPAADGLEKSAPAPEPSPVYVPNARSNGADPHQNGRPGSHHHGRGGGYGGGNRRGNGGGGGRRGSEHHGGFDGQRRGGGRRDGHGPVHQLRGHQPTYIKAPVVAGAPPPPPPFVSPATPQTPPYGPPMGFHDMSAHVYYFPAPTSEGIQGLPFVPLPASPQAVLIDPSRKNLLEQIEYYFSDDNLCKDLYLRQHMDGQGWVPLSLIAGFRQVQKITNNIQFILETVMLSNIVEVQVSVVC

SEQ ID NO: 228412 - protein, 365 aa, Zea Mays; identical to SEQ ID NO: 228411

SEQ ID NO: 228413 - protein, 159 aa, Zea Mays
MADSAALSTSLPRSLASRRPLSSPLHARARARSQRRCRLGSRSLHRLRARAGKDDPEDLYGPYPWDQPLDLTAGSDIQWVPEDRVTLFTSDGLIQIGGSLVPRRVSASEKRQRKLKSGQKLRRFQESSYMDPNQSLCLGALFNIAATNKIMHLWLLPFY

SEQ ID NO: 228414 - protein, 167 aa, Zea Mays
MDDAESASRAGRRRAAAAAGMRLFSPEYYALCAGGGMLAAGATHLAITPLDVLKVNPMKYNSIFSGLNVLVKEEGPSSLWRGWGGKFFGYGVQGGCSSASAQIIADVGLCPFESVKVRVQTQPMFAKGLVDGFPRVYATEGLSGFYRGLLPLWGRNLPFSMLMFSTF

SEQ ID NO: 228415 - protein, 692 aa, Zea Mays
MSTIATPPPPSAAQEKAASRNKRKYRAETPSTELGPFGLEYPLTTDCVGFEFMSPEKVAMAAAVAAAEGVSLDLLQNSCENCKDLHPTAEDLLECQRYVNWGDPNEMQLEEILLKSLDTTFDNSVSLITTMGYSEAAARAAIMRTAAQYDWRESLAGFGEAAVEVLKTEGDMLPREGASVEDMRKIEEAVLGSMVTLVTEAQPFNTPGDVMYCLLMSDMNVANACAMDYNSFSLPAVSAQVIAQPVAGNYEPGSGSNLSVSITNPQTGVTFRGKLTPVPPGSYGAIKADSSTAQASPNVSNTEPSVSDKTQCVIPNIEPKKHHVPICDHSEDQPFVAAATQSVKNDKSSPSKRGGSKRDSFHRQKLTNYDKSSRALGSKGSLRSGKQSSSASAVLERKCRSFSDSTTSNLKGSSRVAKGFAASISGSEVSVDLSFTGTLSPSPSFDAKVVSNSNSAPAASTDLSLALSSSDSLTPSLSHDSNTEVVDSSSKINFSYDEEQKVWIPQDKKDEIVLILVQRQKELQAHTRDWTDWAQQKVMQVAHRLAKEKDELQSLRKEKEEADRLQEERHHLEESTRKKLLEMESAISRANAQLEKAEASARRREVENAQLTLQMEAAKRHAAESATNISELVKKDENSRKRSQRWQSDRALLQEDLAAQKSRLSRVQEHLQHAKELKDQVQSLQNSRAGSV

SEQ ID NO: 228416 - protein, 281 aa, Zea Mays
MAGHGDVFPSLNNSGKLDILLAQGKEYVFVANSDNLGAIVDIKILNHLINNQNEYCMEVTPKTLADVKGGTLISYEGRVQLLEIAQVPDEHVNEFKSIEKFKIFNTNNLWVNLKAVKRLVEAEALKMEIIPNPKEVDGVKVLQLETAAGAAIRFFDKAIGINVPRSRFLPVKATSDLLLVQSDLYTLVDGFVIRNPSRANPANPSIELGPEFKKVANFLARFKSIPSIVELDSLKVSGDVWFGSGITLKGKVTITAKSGVKLEVPDGAVFENKDVNGPEDL

SEQ ID NO: 228417 - protein, 86 aa, Zea Mays
MMETLGKMPRKIASSGTRSKDYFDRYGDLKRVRRLKFWPLDRVLVERYSFSEPDAKGFADFLRPMLDFAPEDRPSAAQCLKHSWLN

SEQ ID NO: 228418 - protein, 139 aa, Zea Mays
MALRRIIKELKDLQRDPPTSCSAGPVSDDMFHWQATIMGPSDSPYSGGVFLVAIHFPPDYPFKPPKVAFKTKVFHPNINSNGSICLDILKEQWSPALTVSKVLLSVCSLLTDPNPDDPLVPEIAHMCKTDRLRRKEVAR

SEQ ID NO: 228419 - protein, 75 aa, Zea Mays
MVLARTQETPDSSIKDVMQLVKACGAIAGSKDHFIATQVFTKNSEREMFLTSDTPEERFQWLSMKYEWMTMNKKG

SEQ ID NO: 228420 - protein, 123 aa, Zea Mays
MYATLAVSPGQSSLISDDADVVALIGTSKDLAKQINQKEVHWGLLEDSVEEQMEKALAESDKIEAESNDADAEDNKARKKGIQKVESKILLLCGDTCFQEHCLHRGRLTVLLSSGMSLSAQKP

SEQ ID NO: 228421 - protein, 395 aa, Zea Mays
MASALETLCGQAYGAKQYHKLGLDTYRAVVTLLVVCVPLSLLWVFMDKILVLIGQDPLISQGAGRYMVWLIPGLFANAVIQPLTKFLQTQSLIYPLLLSSAATAAVHVPLCYVMVFKTGLGYTGAALTISISYWLNVAMLVGYIAFSSSCKETRARPTVEVFRGVDAFLRLALPSALMMCLEWWSFELLTLMSGLLPNPELQTSVLSICLTSVTLLFTIPFGLGAAGSTRVANELGAGNPDGARSAVRVVLSMAGIDAVVVSGSLLAARRLVGIAYSSEEEVISAVAAMVPLVCITAITDCLQGILSGVARGCGWQHLGAYVNLGSFYLLGIPMAILLGFVLRMGSRGLWMGIVCGSLSQTTLMSAITFFTDWNKMAEKARERVFSDKQPQEPGP

SEQ ID NO: 228422 - protein, 464 aa, Zea Mays
MFADLGHFTSASVRVAFITVIYPCLMLQYMGHAAFLSKNTFHMPTGFYDTIPEPVFWPVFVVATLAAVVGSQAVISATFSIVKQCHALGCFPRVKVVHTSRWIYGQIYIPEINWILMVLCVAVTIAFRDTTLIGNAYGIACMTVMLVTTFLMALIVIFVWQRNIIFSLVFLVFFGSIEAVYLSSSLMKVPQGGWVPLVLAFIFMSVMYIWHYGSRRKYQFDLQNKVSMRSILSLGPSLGIVRVPGVGLIYTELVTGVPSIFSHFVTNLPAFHEVLVFLCVKSVPVPYVSPDERYLVGRIGPKEYRMYRCIVRYGYKDVQRDDDNFENMLVMSIAKFIMMEAEDASSASYDIANEGRMAVITTTDASGSPLAMRDFDGLADSMSTRSSKSESLRSLQSSYEQESPSVNRRRRVRFEVPEEDGMGQQVKEELTALVEAKHAGIAYIMGAFLYQSQEELKFPEEVCY

SEQ ID NO: 228423 - protein, 730 aa, Zea Mays
MDAEAGVAGADQLPRRQYYLNLLLLAYQSFGVVYGDLSTSPLYVYKSTFSGKLRHYQDEETVFGVLSLIFWTFTLIPLLKYVIIVLSADDNGEGGPFALYSLLCRHAKLSLLPNQQAADEELSSYYRNGFAPRNGSSPWSRRFLEKHKKMRTLFLLIVLCGASMVIGDGVLTPAISVLSSMSGLHVRATGLHHSSVVLLSCIVLVGLFALQHRGTQKVAFMFAPIVIIWLLSIGGIGLYNILHWNPNVYQALSPYYMVKFFRKTGSEAMFADLGHFTSASVRVAFITVIYPCLMLQYMGHAAFLSKNTFHMPTGFYDTIPVFWPVFVVATLAAVVGSQAVISATFSIVKQCHALGCFPRVKVVHTSRWIYGQIYIPEINWILMVLCVAVTIAFRDTTLIGNAYGIACMTVMLVTTFLMALIVIFVWQRNIIFSLVFLVFFGSIEAVYLSSSLMKVPQGGWVPLVLAFIFMSVMYIWHYGSRRKYQFDLQNKVSMRSILSLGPSLGIVRVPGVGLIYTELVTGVPSIFSHFVTNLPAFHEVLVFLCVKSVPVPYVSPDERYLVGRIGPKEYRMYRCIVRYGYKDVQRDDDNFENMLVMSIAKFIMMEAEDASSASYDIANEGRMAVITTTDASGSPLAMRDFDGLADSMSTRSSKSESLRSLQSSYEQESPSVNRRRRVRFEVPEEDGMGQQVKEELTALVEAKHAGIAYIMGAFLYQSQEELKFPEEVCY

SEQ ID NO: 228424 - protein, 467 aa, Zea Mays
MIAGGGYFDGSHDHILMEGSMIHDSSQSSIYDNTDVEQQNFRFAPFIIEDHSNPANLTSEAARVIDQIQHQLGIDIEQDHSDHMMQEVPPAETENLVPAVYGVQDHILSHQIEGPHNITVEQQVLGYDPASYRNGTYAAAHDLLNSLHIQRLDITNDLPGVANHESGMMFSDSTVPLGYHATQSHMLKDLYHSLPQNYGLFTSDDERDGMVGVPGVSGNIFQEIDGRQFDSPILGSRKQKGGFGKGKGKANFATERERREQFNVKYGALRSLFPNPTKKNSLSTVTKISRTFTIFQNDRASIVGDAIEYINELNRTVKELKILLEKKRNSADRRKILKLDEEAADDGESSSMQPVSDDQNNQMNGTIRSSWVQRRSKECDVDVRIVDDEINIKFTEKKRANSLLCAAKVLEEFHLELIHVVGGIIGDHHIFMFNTKIPKGSSVYACAVAKKLLEAVEIKKQAYNIFN

SEQ ID NO: 228425 - protein, 588 aa, Zea Mays
MLQIQLSINTCNGLICGETFVGPNSANKPALWTENWTSRYLIYGNDTKLRSPQDITFAVALFIARKNGSYVSYYMYHGGTNFGRFASSYVTTSYYDGAPLDEYGLIWQPTWGHLRELHAAVKQSSEPLLFGTYSNLSIGQEQEAHIFETETQCVAFLVNFDQHHISEVVFRNISLELAPKSISILLDCKQVVFETAKVNAQHGSRTAEEVQSFSDISTWKAFKEPIPQDVSKSAYSGNRLFEHLSTTKDATDYLWYIVGYEYTPSDDGQLVLINVESRAHILHAFVNNAYVGRIHGSHGGPANIIFSTNISLQEGPNTISLLSAMVGSPDSGAHMERRVFGIRKVSIQQGQEPENLLNNELWGYQVGLFGERNNIYTQDSKITEWTTIDNLTYSPLTWYKTTFSTPVGNDAVTLNLTGMGKGEVWVNGESIGRYWVSFKAPSGNPSQSLYHIPREFLNPQDNTLVLFEEMGGNPQLITVNTMSVSRVCGNVNELSAPSLQYKDKEPAVDLWCPEGKHISAIEFASYGGPTGDCKKFGFGRCHAGSSESVVKQACLGKSGCSVPVTPIKFGGDPCPGIQKSLLVVANYR

SEQ ID NO: 228426 - protein, 264 aa, Zea Mays
MVGSPDSGAHMERRVFGIRKVSIQQGQEPENLLNNELWGYQVGLFGERNNIYTQDSKITEWTTIDNLTYSPLTWYKTTFSTPVGNDAVTLNLTGMGKGEVWVNGESIGRYWVSFKAPSGNPSQSLYHIPREFLNPQDNTLVLFEEMGGNPQLITVNTMSVSRVCGNVNELSAPSLQYKDKEPAVDLWCPEGKHISAIEFASYGGPTGDCKKFGFGRCHAGSSESVVKQACLGKSGCSVPVTPIKFGGDPCPGIQKSLLVVANYR

SEQ ID NO: 228427 - protein, 311 aa, Zea Mays
MIMGLLRCFTAYEKDDGVKLLIMKGKGRAFCAGGDVAAVVRSIHKDSWKYGADFFRNEFLLNYIIATYTKPQVSLLSGIVMGGGAGVSLHGRFRVATDNTVFAMPETALGLFPDIGASYFLSRLPGFYGEYVGLAGARLDGGEMLACGLATHFVQSNSLLSLEESLKKVDTSNAFAVCGIIDQFAQQPSLKESSSLNRLEIINKCFSKRTVEEIISALIREGRTQTVGECLQREYRMVCHVMRGDFSRDFFEGCRAILLDKDRNPKWMPPRLEQVHDEAVEQYFSRIDDPQWEDLNLPARRSHGRNIESKL

SEQ ID NO: 228428 - protein, 312 aa, Zea Mays
MESFVELLHLSMVYHFHGMIDMLINCGYEKGTTLFGYGYDFRQSNRIDKAMAGLRAKLETAYKTSGGKKVNLISHSMGGLLVFTKYVNKWICIACPFQGAPGCINDSLLTGLQFVYGFESFFFVSRWAMHQLLVECPSIYEMLPNPEFKWKEKPIIQVWRKNPEKDGTVELVQYEATDCVSLFEEALRNNELTYNGKKVALPFNMSVFKWATKTRQILDNAELPDTVSFYNIYGTSYETPYDVWLIGCQCIKFKADGFSAKERVGVKADHRGLLSDENVFKLLKKWLGVSEKKSEWRCVSKSYSKVGNWVAL

SEQ ID NO: 228429 - protein, 538 aa, Zea Mays
MANASRGRVGGGGRSSVLALLLLLSAGGARASYDGEGEAARAGAEEKEKAAAWTGGLSRRSFPKGFVFGTAASAYQVEGMAHKDGRGPSIWDAFIKIPGEIANNATADVTVDEYHRYKEDVNIMKNMGFDAYRFSISWSRIFPNGTGEVNWKGVAYYNRLINYMVKKGITPYANLYHYDLPEALEVRYGGLLSREVVSFADYADFCFGAFGDRVKNWLTFNEPRVVAALGYDDGRFAPGRCTGCEAGGDSGTEPYVVAHHLILSHAAAVQRYRRRHQPTQRGRVGILLDFVWYEPLTADSAADRAAAQRSRDFHVGWFLHPIVYGEYPKSVRRSVKGRLPKFTAEEAGLVRGSIDYVGVNQYTAYYVRDRRPNATAAPPSYSSDWHAEFVSSLTPIHATLHADERDGVPIGPRANSDWLYIVPWGLYKAVTYVKEKYGNPTMLLSENGMDDPGNVTVGQGVRDAARVAYYRSYVAELKAAIDGGANCVGYFAWSLLDNFEWKLGYTSRFGLVYVDFRTLRRYPKSSAYWFRDVIAGTN

SEQ ID NO: 228430 - protein, 513 aa, Zea Mays
MKYVLVTGGVVSGLGKGVTASSIGVVLKACGLRVTSIKIDPYLNTDAGTMSPFEHGEVFVLDDGGEVDLDLGNYERFLDIKLTRDNNITTGKIYQSVIDKERRGDYLGKTVQVVPHITDEIQDWIQRVAMNPVDDTEEPADVCVIELGGTIGDIESMPFIEALGQFSYRVGPGNFCLVHVSLVPVLNVVGEQKTKPTQHSVRGLRGLGLMPDILACRSTQPLEEHVKVKLAQFCHVPIPNIINLHDVTNIWHIPLLLRDQKAHEAILKGADGVLVPGGFGDRGVQGKILAAKYARENNVPYLGICLGMQIAVIEFARSVMKLHGANSTEFDPTTKTPCVVFMPEGSKTHMGATMRLGSRRTFFQATNCKSAKLYGNACYVDERHRHRYEVNPDMVPEFEKAGLSFVGRDESGERMEIIELPTHRFFVGAQFHPEFKSRPGKPSPLFLGLVAASSGQLDHLLQRGLTSSAGRDICGKGGAQKPKACQNGHVMKPLNGLVHGHYSATRCNGVIPI

SEQ ID NO: 228431 - protein, 588 aa, Zea Mays
MKYVLVTGGVVSGLGKGVTASSIGVVLKACGLRVTSIKIDPYLNTDAGTMSPFEHGEVFVLDDGGEVDLDLGNYERFLDIKLTRDNNITTGKIYQSVIDKERRGDYLGKTVQVVPHITDEIQDWIQRVAMNPVDDTEEPADVCVIELGGTIGDIESMPFIEALGQFSYRVGPGNFCLVHVSLVPVLNVVGEQKTKPTQHSVRGLRGLGLMPDILACRSTQPLEEHVKVKLAQFCHVPDQKAHEAILKVLDLQCASKVAREPQLSEWTERVSRCDRLKSPVRIAMVGKYTGLSDSYLSVIKALLHASVALDRKLVVDWVPSCDLEDSTAKETPDAYEKAWESLKGADGVLVPGGFGDRGVQGKILAAKYARENNVPYLGICLGMQIAVIEFARSVMKLHGANSTEFDPTTKTPCVVFMPEGSKTHMGATMRLGSRRTFFQATNCKSAKLYGNACYVDERHRHRYEVNPDMVPEFEKAGLSFVGRDESGERMEIIELPTHRFFVGAQFHPEFKSRPGKPSPLFLGLVAASSGQLDHLLQRGLTSSAGRDICGKGGAQKPKACQNGHVMKPLNGLVHGHYSATRCNGVIPI

SEQ ID NO: 228432 - protein, 158 aa, Zea Mays
MKYVLVTGGVVSGLGKGVTASSIGVVLKACGLRVTSIKIDPYLNTDAGTMSPFEHGEVFVLDDGGEVDLDLGNYERFLDIKLTRDNNITTGKIYQSVIDKERRGDYLGKTVQVVPHITDEIQDWIQRVAMNPVDDTEEPADVCVIELGGTIGDNIFAA

SEQ ID NO: 228433 - protein, 186 aa, Zea Mays
MAPYSSQSINPLDVSIMAPDYVTLAEDSIHVEANGHNETQVRVSVNDDANSTTIVIKVAEKSCNISIHSAITRETAGSGRVIRMPLTPTYTLLPVFLLLVAVAVCIVVRRWRNQDGDPAYQKLDMSDLPVSVGGKKEHDDRSDKWDDNWGDDWDDEEAPVTPSKPLPNPSSKGLAPRRSAKDGWKD

SEQ ID NO: 228434 - protein, 815 aa, Zea Mays
MFQAERNLDLFEPFLAFRRALLKILGCEEHLVKHLFQSASALRKGLRFSLAAAALYELKELCFHRDESTMTNTYLLARLEDAKLLRAQGQHDMAISLGKYILQKLSDKKNLSDVYRLVGKWLAETRSSNSRTIIEDYLRPSIDLSEFEKSTDKRYMSRQCRTHFHLAHYTYSLFRSYEERLSSNEWQAALRLRKYKTRELEILIKRLRSSSKGVKTDYSVKIQELQKQLALDREEAEKIQDDHDNFLNLALQGYQRSIVVGGKYDLQVVFRLVSLWFSLFSRDQVVKAMLKTTKEVQTYKFIPLVYQIASRLGSTKDAQGSFNFQIALASLLKKMAVDHPYHTIFQLLALANGDRVKDKQRSRSSFVVDMEKKLAAENLLKELSSCHGPLICQMKQMVEIYIKLAELETKKEDTNKKIPLPREARSIGQLELVPVVTATVPIDPSCRYEEGSFPHFTGLADSIMIMNGINAPKVIECFGSDGNKYRQLAKSGNDDLRQDAVMEQFFSLVNTFLQNHRDTSKRRLKIRTYKVVPFTPSAGVVEWVNGTVPLGDYLIGSTRSGGAHGRYGIGDWTYLQCREYLMSEKDKRRAFLKICSNFRPVMHHFFLERFLLPADWFQSRLAYTRSVAASSMVGYIVGLGDRHSMNILIDQDTAEVVHIDLGVAFEQGLMLKTPERVPFRLTRDIIDGMGVTGVEGVFRRCCEKTLCVMRANKEALLTIIEVFVHDPLYKWALSPLKALQRQKETVDTDSCLDDSQEPYDGNKDAARAILRVKQKLDGYEDGEMRSVQGQVQQLIQDAVDVDRLCQMFPGWGPWL

SEQ ID NO: 228435 - protein, 1126 aa, Zea Mays
MESSASAVCKRCSCDFAILMYVELWCEEQFNRLVLGPPEFSNEELLPPHVDLLVAAFTRINEPDSIYGLTLSNEIASQLIRYEHEGDWSSALEYYDLLVRSMPKEHLGTLTGSVLTGPSTVSSRAEDTMLNWKMHKGLMRSLQKTGCSHVLDVYCEGLSHQKGCLQQDAEFIDIQYEAAWRAGNWDFSFFVPYSSWSSTRSRSSCLFNENLHSCLRALQNGDSEEFHAKLCQTKMDLVLALSNTSKESTKYIHSTILKLQILDHATMVWDLRWNLNPNQTSKSPVTKEFSHISTVPKGIQLELLDKEWNLIMFQAERNLDLFEPFLAFRRALLKILGCEEHLVKHLFQSASALRKGLRFSLAAAALYELKELCFHRDESTMTNTYLLARLEDAKLLRAQGQHDMAISLGKYILQKLSDKKNLSDVYRLVGKWLAETRSSNSRTIIEDYLRPSIDLSEFEKSTDKRYMSRQCRTHFHLAHYTYSLFRSYEERLSSNEWQAALRLRKYKTRELEILIKRLRSSSKGVKTDYSVKIQELQKQLALDREEAEKIQDDHDNFLNLALQGYQRSIVVGGKYDLQVVFRLVSLWFSLFSRDQVVKAMLKTTKEVQTYKFIPLVYQIASRLGSTKDAQGSFNFQIALASLLKKMAVDHPYHTIFQLLALANGDRVKDKQRSRSSFVVDMEKKLAAENLLKELSSCHGPLICQMKQMVEIYIKLAELETKKEDTNKKIPLPREARSIGQLELVPVVTATVPIDPSCRYEEGSFPHFTGLADSIMIMNGINAPKVIECFGSDGNKYRQLAKSGNDDLRQDAVMEQFFSLVNTFLQNHRDTSKRRLKIRTYKVVPFTPSAGVVEWVNGTVPLGDYLIGSTRSGGAHGRYGIGDWTYLQCREYLMSEKDKRRAFLKICSNFRPVMHHFFLERFLLPADWFQSRLAYTRSVAASSMVGYIVGLGDRHSMNILIDQDTAEVVHIDLGVAFEQGLMLKTPERVPFRLTRDIIDGMGVTGVEGVFRRCCEKTLCVMRANKEALLTIIEVFVHDPLYKWALSPLKALQRQKETVDTDSCLDDSQEPYDGNKDAARAILRVKQKLDGYEDGEMRSVQGQVQQLIQDAVDVDRLCQMFPGWGPWL

SEQ ID NO: 228436 - protein, 1458 aa, Zea Mays
MAGAISHHALAFSQSHWCSAKNSRFGKRTGNARLVYLKGRCGSGSKKLGLMWASSSQSSVMEPRHLPSDGNSGHTPKKSSESALILIRHGESLWNEKNLFTGCADVPLTPKGVEEAIEAGKRICNIPIDVIYISSLIRAQMTAMLAMMQHLRKKVCVFPLKFQYGELQGLNKQETADRFGKEQVHEWRNSYDIPPPNGESLEKCAERAVAYFKDQIVPQLVAGKHVMVAAHGNSLRSIIMHLDKLTSQEEGVKLLGTWLQGDRAASFCRLLGRNTVRFKPGHGNLTGGHSLHLLSVAKQLFVHIWEVIKDGPSLQLEYSIILRQLLNVKEYRYQMKPRTYSNFVSLYMKKVASAFDAKFSNQASSKDESFRCTLTLHVLLENPPSDYPDIMREESLFITYVKVQLKIARNIPEILEKLIDVIIKELDKNVNTGPGLLWCEAPRDEKAVSLRCFQEEWMDLSATVFYLACKCTTKTANREKRMKKEHIMNLIVDGLFRGSLFWSGSVCFLIHKYGYHLEKSLLISWFEASCKALRSILIHANAIRFQDSLLWLLRTFKEFSTVLMLDTRDKVQFCLTKGEMSIVEDCWQAIWNSLVHAFPLLSSIDLVADSALILLGGMIMRDQVHTSFLSEDTWNLQIFKKFPSPSALYFVACYFSRIGFQGDLSNSIFVRKTLLRSTLELIHSKEFSLLNEQNVVIIPEAIFSLCAGFSSPVINSSDILQLFGHCKIHSKMSLEDDNWVLKDELPYSVEALSEITLDTCTKVMSHKCHLIHLPGTIQQPMLLELMEFMKGFVASNEQFEKVDLNNLVLVCSLLCNLIHCALLSRTMEEKSSLLQETVDYVTNILKHIVSFVVKKNDELSHGLTNISSALDTMGSAFSSIKSLLSSPIFNLSRVDNGVCSVVIKSITELLDELLVAISQLFCQISSLVSNFDAESTGKMLPTSSINLEDLNPVLDCKSSVADMDLDVMDSSEVDSVTASASGSMGSFLRPLEWKLDLVCIISTFFSVSSLHTWEILYSLVDKEGDVKVRQAILLNLCRNISASSKTVSLVVHFIVDMRDRGASSLLGPAECLTHIHALLKALIAIHGGQNADGKQPGREVFFSENQDILFDLLNRATDISSVDWFSRIKFIDCVSSFVCLFPDVAQDLIGCLLDMLHDADYRVRLYLARQIVVLFQTWEGHNELFNDVCSSIGAKMVKFSNISPVTAREVLAVGPQSVLVIETALITLAHLAVHSEDVEVECLFMISAAAAIEPSQRELAFALFDSISRRLGYASRSKYLDQVMGPILFRWVACEMNLISLVEVQEMFGYGSAEPNNFVEHCSSWLLPFLILRGDGADMNWISKILSQPLSIIIKRYFVPIFGMCIAVRCGTGPEKDLAETVLCESVLQLGEISELERDDLIKKHMVAIVAFLLSVSSSAHGPQIPYFSKKNVALSVRMVVDGFVDTMYILFVSPYVF

SEQ ID NO: 228437 - protein, 307 aa, Zea Mays
MALSYGLSLNNSFVFSIQNQCQLSNQIISVERVNQYMDIPSEAAEVIEENRPSPNWPQVGRVELRDLKIRYREDAPLVLHGITCTFEGGDKIGIVGRTGSGKTTLIGALFRLVEPTGGKIIIDSVDITTIGLHDLRSRLGIIPQDPTLFQGTIRYNLDPLEQFSDQQIWEVLDKCQLLEAVQEKEQGLDSLVVEDGSNWSMGQRQLFCLGRALLRRCRVLVLDEATASIDNATDAILQKTIRTEFRDCTVITVAHRIPTVMDCSMVLALSDGKLVEYDKPTKLMETEGSLFRDLVKEYWSYASNGNI

SEQ ID NO: 228438 - protein, 796 aa, Zea Mays
MAGVCGSPFCSREASAPAPASCGRWDELLNSSTCANNILATGAAALLAVVLALQLLVRVARNGLRHAPVVALSSPLQRAAVAANACLGLAYLGLAAWMLGTDLTQRASVYLPHRWLVSLAQGLCLLLAGFAFSVRAQLLGAAFLRVWAALLAAYAAFVCCTSVVHMVADKVLAVKTCLDVLSLPGALLLLVYGIRHAREEEEGDGNGGTESSLYKPLNAEAHDDGAADSRVTPFAKAGVFSIMTFWWLNPMMKKGYEKPLEEKDMPLLGPSDRAYSQYLMFLDNLNRKKQLQAHGNPSVFWTIVSSHKSAILVSGLFALLKVLTLSAGPVLLKAFINVSLGKGSFKYEGFVLAAAMFAIKCCESLSQRQWYFRTRRLGLQVRSLLSAAIYKKQQKLSGSSKLKHSSGEIINYVTVDAYRIGEFPYWFHQTWTTSVQLCIALGILYNAVGLAMIASLVVIVLTVICNAPLSKLQHKFQTRLMEAQGVRLKAMSESLIHMKVLKLYAWETHFKKVIEGLREIEIKWLSAFNLRKSFNGFVFWTSPVLVSAATFLTCYLLKIPLDASNVFTFVATLRLVQDPIRQMPDVIGVVIQAKVAFTRITKFLDAPELSGQARKKYCVGDEYRIVMNSCSFSWDENPSKPTLKNINLVVKAGEKVAICGEVGSGKSTLLAAVLGEVPKTEGMIQICGKTAYVSQNAWIQTGTVQDNILFGSSMDRQRYQETLERCSLVKDLEMLPYGDHTQIGERGVNLSGGQKQRVQLARALYQNADIYLLDDPFSAVDAHTATSLFNIRLSFW

SEQ ID NO: 228439 - protein, 931 aa, Zea Mays
MTDGSWMAGVCGSPFCSREASAPAPASCGRWDELLNSSTCANNILATGAAALLAVVLALQLLVRVARNGLRHAPVVALSSPLQRAAVAANACLGLAYLGLAAWMLGTDLTQRASVYLPHRWLVSLAQGLCLLLAGFAFSVRAQLLGAAFLRVWAALLAAYAAFVCCTSVVHMVADKVLAVKTCLDVLSLPGALLLLVYGIRHAREEEEGDGNGGTESSLYKPLNAEAHDDGAADSRVTPFAKAGVFSIMTFWWLNPMMKKGYEKPLEEKDMPLLGPSDRAYSQYLMFLDNLNRKKQLQAHGNPSVFWTIVSSHKSAILVSGLFALLKVLTLSAGPVLLKAFINVSLGKGSFKYEGFVLAAAMFAIKCCESLSQRQWYFRTRRLGLQVRSLLSAAIYKKQQKLSGSSKLKHSSGEIINYVTVDAYRIGEFPYWFHQTWTTSVQLCIALGILYNAVGLAMIASLVVIVLTVICNAPLSKLQHKFQTRLMEAQGVRLKAMSESLIHMKVLKLYAWETHFKKVIEGLREIEIKWLSAFNLRKSFNGFVFWTSPVLVSAATFLTCYLLKIPLDASNVFTFVATLRLVQDPIRQMPDVIGVVIQAKVAFTRITKFLDAPELSGQARKKYCVGDEYRIVMNSCSFSWDENPSKPTLKNINLVVKAGEKVAICGEVGSGKSTLLAAVLGEVPKTEGMIQICGKTAYVSQNAWIQTGTVQDNILFGSSMDRQRYQETLERCSLVKDLEMLPYGDHTQIGERGVNLSGGQKQRVQLARALYQNADIYLLDDPFSAVDAHTATSLFNEYVMGALSDKTVLLVTHQVDFLPVFDSVLLMSDGEIIRAAPYQDLLAHCQEFQNLVNAHKDTIGVSDLNRVRSHRTNENKGSIDIHGSLYKESLKPSPADQLIKTEEREMGDTGLKPYILYLRQNKGFFNGSMDR

SEQ ID NO: 228440 - protein, 134 aa, Zea Mays
MREILHIQGGQCGNQIGAKFWEVICDEHGIDHTGKYAGDSDLQLERINVYYNEAGGGRFVPRAVLMDLEPGTMDSVRSGPYGQIFRPDNFVFGQSGAGNNWAKGHYTEGAELIDSVLDVVRKEAENCDCLQGGR

SEQ ID NO: 228441 - protein, 382 aa, Zea Mays
MMAGNEDQLRAVAARAVTDSLRAAASRCSAADRAARFRDCVRSLEAEKAKMEVFRRELPISVHLVADVIDWLKEELAQHRRRPSDLFAPPAPPPPAKDGAVLADADANDKRSWMSSVQLWSCGSHDDSTANTNGAAAAAHKVSSAFVALAASPPAPTLARPSGDAAGKPGASASAMPVADLSLSSPAAAASPSAASSAVTDAAGAHRRQHAQQRKARRCWSPGLHRRFVAALQRLGGAQVATPKQIRELMKVDGLTNDEVKSHLQHVAVAVAVRVAAGAAAAGGVEQGHVGHRRGQLRRRRRGPGRPVGELRLGDAAARDEGVVVLMILVLGRDHNSQQYRRRCGVGHGTEDNCGRGGIFCTGVEMISFFPLPFFSGRGRRM

SEQ ID NO: 228442 - protein, 476 aa, Zea Mays
MSPTSSHGKSGKVTKSVAKPHERNLFLQSLSEEEQNPSSSDGQNNASVEDKDLVANLENGVKFWTDYSKVQYHPQSLYELYGSWTDFDRFDNYGTAKEVVSEWSQMEEMNERLRFFVEECDHIQGIQFLVDDSGGFASVAAQFLESIVDDYTNTPVMLYCVRNPDSYGSSRNQCETIIRSLHDAVSLSKLSYYCNLMVPIGLPSLSYLSPLLSIKDEKHFHSSAICAAAMHSLSIPFRLQHVGPASDSAHSSGKLDIGELVHILSDQGRQNMITALDVAMPAPSLTDRTDLRNIQRSLHSLTPEISDEDEDPYAVESMVVHGVLDAGGKRASISQVKESICSALEGRATKPKFSHLSVSRCPLPIPLPFPSIFSSSVGQQGEILGTSHAGARPKGPLAVGSVPMAARLRSSSAIAPFIERRSASLQRLGVARGTLGSQVLHDWGFGREEVEDMAEHLAKMLRPFYPEMDLTSDSDD

SEQ ID NO: 228443 - protein, 319 aa, Zea Mays
MQCSFYYNPALWSACLSLSHCLYRILCRFCESLLMCVPLTLFFYFDCSGYLSPLLSIKDEKHFHSSAICAAAMHSLSIPFRLQHVGPASDSAHSSGKLDIGELVHILSDQGRQNMITALDVAMPAPSLTDRTDLRNIQRSLHSLTPEISDEDEDPYAVESMVVHGVLDAGGKRASISQVKESICSALEGRATKPKFSHLSVSRCPLPIPLPFPSIFSSSVGQQGEILGTSHAGARPKGPLAVGSVPMAARLRSSSAIAPFIERRSASLQRLGVARGTLGSQVLHDWGFGREEVEDMAEHLAKMLRPFYPEMDLTSDSDD

SEQ ID NO: 228444 - protein, 335 aa, Zea Mays
MASPPPPRVCVTGGGGYVASWLVKLLLSRGYAVHATVRDPSDPKNAHLQQLDGARERLRLFKADVLDRDALATAVVACEGVFHVASPVPADKSEVLSPAVKGTLNVLQACSANNVQKVVVVSSTAAVYFNPSWPQGRTKDESCWSDRDLCIKNENWYCAAKTIAEETAVEYGEKNGLIVVTVCPCIVLGPLLQPLINASSELLVYIIKGGPRVLKNLPWNIVDVRDVADALLLVYEKVESSGRYICAPNRISTNNMVNLFKKSYPNYNYVNCDNKDYESEISPVTSEKLKSLGWNPRTMEKTLLDNIEYFEKAGFLRDGEGYPCRLPHIFHFASD

SEQ ID NO: 228445 - protein, 312 aa, Zea Mays
MFAQAQRSPQTNPSNYSLSGQVSGQQTAPSGSVTGDEQKGYPWAHTIPMRQAIASTRPPQFRPSSSGQMRSNTVQTMQHHVQRPQTSSPVFGANSIHARPFLRPVGGPAAPFRPQMADSNPRAHLIQGAVTTISRSVPKRSIVSGNAPVNQALGSSKVSAGMESQSQQLSAPKPLAATSLSQTQSHGIQEEPKIQGKKQLLFESLPATDLKYWSLERKLCQPLLITEKMFAYRETVLEEAHQGMELHEHCRHIVDNDDQHCRFHSLCVHQVGLRNTEQQQQYRKESAYVGQMVCHIFSSLMMLQRCIFSFLG

SEQ ID NO: 228446 - protein, 89 aa, Zea Mays
MFAQAQRSPQTNPSNYSLSGQVSGQQTAPSGSVTGDEQKGYPWAHTIPMRQAIASTRPPQFRPSSSGQMRSNTASRAATTNIFTSVWGK

SEQ ID NO: 228447 - protein, 65 aa, Zea Mays
MATEPPPAAEKKKAPLPKVVTLNKALKLAQTWVDKMSASEPDEPNDKDFEGRPPSSVLVLKRHLV

SEQ ID NO: 228448 - protein, 125 aa, Zea Mays
MGHKFSEGFRAKQMAEDVPSNSGRGMNAASLHDGLDDSGEDDELNRANGEVPAEEMLSDDYYEQDGEEQIESLHRGGTKQSSCSTSEDDPADVDFEPDSETDKATDKMMMMTLLRTGGNLNDLRL

SEQ ID NO: 228449 - protein, 920 aa, Zea Mays
MTEEEEDEEYLKEEEDALAGAGGTRLVSQPSCIKGKMRDYQLAGLNWLIRLYENGINGILADEMGLGKTLQTISLLGYLHEFRGITGPHMVVAPKSTLGNWMKEIQRFCPILRAVKFLGNPEERNHIRDDLLQPGKFDVCVTSFEMAIKEKSALRRFSWRYIIIDEAHRIKNENSLLSKTMRIYNTNYRLLITGTPLQNNLHELWALLNFLLPEIFSSAETFDEWFQISGENDQQEVVQQLHKVLRPFLLRRLKSDVEKGLPPKKETILKVGMSQMQKQYYRALLQKDLEVINAGGERKRLLNIAMQLRKCCNHPYLFQGAEPGPPYTTGEHLVENAGKMVLLDKLLPKLKERDSRVLIFSQMTRLLDILEDYLMYRGYQYCRIDGNTGGEDRDASIEAFNKPGSEKFVFLLSTRAGGLGINLATADVVVLYDSDWNPQADLQAQDRAHRIGQKKEVQVFRFCTEIMQTKLQYTIEEKVIERAYKKLALDALVIQQGRLAEQKTVNKDDLLQMVRFGAEMVFSSKDSTITDEDIDRIIAKGEETTAELDAKMKKFTEDAIKFKMDDNAELYDFDDEKDENKVDFKKLVSDNWIEPPRRERKRNYSESDYFKQALRQGAPAKPREPRIPRMPHLHDFQFFNNQRLNELYEKEVRYLMQANQKKDTIDGEDEDQLEPLTAEEQEEKEQLLEEGFASWTRRDFNTFIRACEKYGRNDIKSISSEMEGKTEEEVQRYAKVFKERYKELTDYDRIIKNIERGEARISRKDEIMKAIGKKLDRYKNPWLELKIQYGQNKGKFYNEECDRFMLCMVHKLGYGNWDELKAAFRMSPLFRFDWFVKSRTTQELARRCDTLIRLVEKENQEYDEQERQARKEKRLAKNTTPTKRAALRNSEGESAPLSSFKRRRQSLMDDYVGSGRRKRG

SEQ ID NO: 228450 - protein, 95 aa, Zea Mays
MSPLFRFDWFVKSRTTQELARRCDTLIRLVEKENQEYDEQERQARKEKRLAKNTTPTKRAALRNSEGESAPLSSFKRRRQSLMDDYVGSAKERVM

SEQ ID NO: 228451 - protein, 633 aa, Zea Mays
MEAIVQQLINLAQNTSIIQFFPIRFMLQSNFIVILIGLTNSILQADEELLSDLGTDVKDECTKFDLVDNVKVNYAGAFVMMINCNLCLSIGVICLMDAFFINTMGISYTSNEALGTPPWPTQPLPSPAMERVLKDDAVEEKGERARMASFVGAMAISDLVKTTLGPKGMDKILQSTGRGRNVTVTNDGATILKSLHIDNPAAKVLVAGELLKEAEKLINMKIHPMTIIAGYRMALECARDSLLKKTMDNKENTDKFRSDLMNIAMTTLSSKILSQDKEYFAELAVDAVLRLKGSTNLESIQILKKPGGSLKDSFLDEGFILDKKIGIGQPKRIENAKILVANTAMDTDKVKIYGARVRVDSMSKVADIEAAEKQKMREKVQKIIAHGINCFVNRQLIYNFPEELFADAGILAIEHADFEGIERLALVTGGEIASTFDNPESVKLGQCKVIEEIMIGEDRLIHFSGVAMGQACTIVLRGASEHVLDEAERSLHDALCVLSQTVNDTRVLFGGGWPEMVMAKEVDELARKTPGKKSHAIDAFSHALQAIPTIIADNAGLDSADLISQLRAEHHKENSTAGIDVITGTVGDMQKLGIQESFKVKQAILLSATEAAEMILRVDEIITCAPRRREDRM

SEQ ID NO: 228452 - protein, 782 aa, Zea Mays
MAVLVAEFILRFTVMLMDLEVITGILKNKLLRHAIILIPNWIYDESNNDKRFDKYSGKVASEKQGSSNDRALREELAIFSKEVIRFGNLCKDPIWHNLGRYFDKLATDNTPQDHSKGSMEAIVQQLINLAQNTSIIQFFPIRFMLQSNFIVILIGLTNSILQADEELLSDLGTDVKDECTKFDLVDNVKVNYAGAFVMMINCNLCLSIGVICLMDAFFINTMGISYTSNEALGTPPWPTQPLPSPAMERVLKDDAVEEKGERARMCFTTFPACALNFSGCFKMGMVPCLGVPSHVLASFVGAMAISDLVKTTLGPKGMDKILQSTGRGRNVTVTNDGATILKSLHIDNPAAKVLVAGELLKEAEKLINMKIHPMTIIAGYRMALECARDSLLKKTMDNKENTDKFRSDLMNIAMTTLSSKILSQDKEYFAELAVDAVLRLKGSTNLESIQILKKPGGSLKDSFLDEGFILDKKIGIGQPKRIENAKILVANTAMDTDKVKIYGARVRVDSMSKVADIEAAEKQKMREKVQKIIAHGINCFVNRQLIYNFPEELFADAGILAIEHADFEGIERLALVTGGEIASTFDNPESVKLGQCKVIEEIMIGEDRLIHFSGVAMGQACTIVLRGASEHVLDEAERSLHDALCVLSQTVNDTRVLFGGGWPEMVMAKEVDELARKTPGKKSHAIDAFSHALQAIPTIIADNAGLDSADLISQLRAEHHKENSTAGIDVITGTVGDMQKLGIQESFKVKQAILLSATEAAEMILRVDEIITCAPRRREDRM

SEQ ID NO: 228453 - protein, 150 aa, Zea Mays
MFDERNKRAAFADLFASVTFTAQYGNFQRLFLDLTKASARFDITSGSLFLCGASRLAQDFFFSRRPDVETFCDICPDVTVSFQQQIVGPFSFRVESSVAIDPRSQDHFVRVDDPIFAIDWALKVLGSAKATAWYSPKHQEAMMELRFYET
